(19) United States
(12) Patent Application Publication
(10) Pub. No.: US 2022/0135684 A1
(43) Pub. Date: May 5, 2022

(54) BISPECIFIC ANTIBODIES THAT BIND PD-L1 AND CD28

(71) Applicant: Xencor, Inc., Monrovia, CA (US)

(72) Inventors: John R. Desjarlais, Pasadena, CA (US); Gregory Moore, Azusa, CA (US); Michael Hedvat, Encino, CA (US); Juan Diaz, Anaheim Hills, CA (US); Veronica Gusti Zeng, Duarte, CA (US); Umesh S. Muchhal, Monrovia, CA (US)

(21) Appl. No.: 17/501,846

(22) Filed: Oct. 14, 2021

Related U.S. Application Data
(60) Provisional application No. 63/091,806, filed on Oct. 14, 2020.
(60) Provisional application No. 63/110,916, filed on Nov. 6, 2020.
(60) Provisional application No. 63/173,242, filed on Apr. 9, 2021.

(51) Int. Cl. C07K 16/28; A61K 39/00

(52) U.S. Cl. CPC C07K 16/2818; C07K 16/2827; C07K 2317/31; C07K 2317/622; A61K 2039/505; C07K 2317/92

(57) ABSTRACT

Provided herein are novel αPD-L1 antibodies and methods of using such antibodies for the treatment of cancers. In some embodiments, the antibodies are αPD-L1×αCD28 bispecific antibodies. Such antibodies enhance anti-tumor activity by providing a costimulatory signal for T-cell activation against tumor cells while advantageously also blocking inhibitory PD-L1:PD-1 pathway interactions.

### PRIORITY

[0001] This application claims the benefit of U.S. Provisional Patent Application Nos. 63/091,806, filed Oct. 14, 2020, 63/110,916, filed Nov. 6, 2020 and 63/173,242, filed Apr. 9, 2021, which are hereby incorporated by reference in their entireties.

### SEQUENCE LISTING INCORPORATION PARAGRAPH

[0002] The instant application contains a Sequence Listing which has been submitted electronically in ASCII format and is hereby incorporated by reference in its entirety. Said ASCII copy, created on Oct. 12, 2021, is named 067461-5275-WO_SL.txt and is 1,521,746 bytes in size.

### BACKGROUND

[0003] The natural immune response against tumor dispatches immune effector cells such as natural killer (NK) cells and T cells to attack and destroy tumor cells. Tumor infiltrating lymphocytes (TILs) often express multiple immune checkpoint receptors (e.g., PD-1, CTLA-4) and costimulatory receptors (e.g., ICOS, 4-1BB, OX40, GITR, and CD28). TILs lose their cytotoxic ability over time due to upregulation of inhibitory immune checkpoints. While checkpoint blockade has demonstrated increased clinical response rates relative to other treatment options, many patients still fail to achieve a response to checkpoint blockade. Engagement of costimulatory receptors on TILs could provide a positive signal capable of overcoming negative signals of immune checkpoints. Preclinical and clinical studies of agonistic costimulatory receptor antibodies have indeed demonstrated that agonism of costimulatory receptors can result in impressive anti-tumor responses, activating T cells to attack tumor cells.

[0004] It is also important for cancer therapy to enhance anti-tumor activity by specifically destroying tumor cells while minimizing peripheral toxicity. In this context, it is crucial that only T cells in the presence of the target tumor cells are provided a costimulatory signal. However, agonism of costimulatory receptors with monospecific full-length antibodies is likely nondiscriminatory with regards to TILs vs. peripheral T cells vs. autoantigen-reactive T cells that contribute to autoimmune toxicities. For instance, urelumab, a monospecific, nondiscriminatory, pan-4-1BB agonist antibody, exhibited significant liver toxicity in early phase clinical trials (Segal et al., 2016). Thus, there remains a need for novel immune response enhancing compositions for the treatment of cancers.

### SUMMARY

[0005] Provided herein are novel αPD-L1 antibodies. In some embodiments, the antibodies are αPD-L1×αCD28 bispecific antibodies. Such antibodies enhance anti-tumor activity by providing a costimulatory signal for T-cell activation against tumor cells while advantageously also blocking inhibitory PD-L1: PD1 pathway interactions (see FIG. 34). In some embodiments, such αPD-L1×αCD28 bispecific antibodies are useful for the treatment of cancers in conjunction with αCD3×αtumor target antigen (TTA) bispecific antibodies.

[0006] In a first aspect, provided herein is a heterodimeric antibody that comprises: a) a first monomer, b) a second monomer, and c) a light chain. The first monomer comprises: i) a scFv comprising a first variable heavy domain, an scFv linker and a first variable light domain; and ii) a first Fc domain, wherein the scFv is covalently attached to the N-terminus of the first Fc domain using a domain linker. The second monomer comprises, from N- to C-terminus, a VH1-CH1-hinge-CH2-CH3, wherein VH is a first variable heavy domain and CH2-CH3 is a second Fc domain. The light chain comprises, from N- to C-terminus, VL1-CL, wherein VL1 is a variable light domain and CL is a constant light domain. The VH1 and the VL1 form a first antigen binding domain (ABD). The scFv comprises a second VH domain (VH2), a scFv linker, and a second VL domain (VL2) and the VH2 and the VL2 form a second ABD. Further, one of the ABDs binds CD28 and the other binds PD-L1.

[0007] In some embodiments, the scFv comprises, from N- to C-terminus, VH2-scFv linker-VL2. In other embodiments, the scFv comprises, from N- to C-terminus, VL2-scFv linker-VH2.

[0008] In some embodiments, the first ABD binds PD-L1, wherein the amino acid sequence of the VH1 is selected from the group consisting of: SEQ ID NO:1079, SEQ ID NO:1042, SEQ ID NO:1055, SEQ ID NO:1059, SEQ ID NO:1063, SEQ ID NO: 1067, SEQ ID NO: 1071, SEQ ID NO: 1075, SEQ ID NO:1083, SEQ ID NO:1087, SEQ ID NO:1091, SEQ ID NO:1095, SEQ ID NO:1099, and SEQ ID NOs:736-797 or a variant thereof, and wherein the amino acid sequence of the VL1 is selected from the group consisting of: SEQ ID NO:1111, SEQ ID NO:1046, SEQ ID NO:1103, SEQ ID NO:1107, SEQ ID NO:1115, SEQ ID NO:1119, SEQ ID NO:1123, SEQ ID NO:1127, SEQ ID NO:1131, SEQ ID NO:1135, SEQ ID NO:1139, SEQ ID NO:1143, SEQ ID NO:1147, SEQ ID NO:1151, SEQ ID NO:1155, and SEQ ID NOs:798-868 or a variant thereof.

[0009] In certain embodiments, the first ABD binds PD-L1, and the VH1 and VL1 are selected from the group consisting of: a VH1 having an amino acid sequence of SEQ ID NO:1183 and a VL1 having an amino acid sequence of SEQ ID NO:1187; a VH1 having an amino acid sequence of SEQ ID NO:1042 and a VL1 having an amino acid sequence of SEQ ID NO:1047; a VH1 having an amino acid sequence of SEQ ID NO:1159 and a VL1 having an amino acid sequence of SEQ ID NO:1163; a VH1 having an amino acid sequence of SEQ ID NO:1167 and a VL1 having an amino acid sequence of SEQ ID NO:1171; a VH1 having an amino acid sequence of SEQ ID NO:1175 and a VL1 having an amino acid sequence of SEQ ID NO:1179; a VH1 having an amino acid sequence of SEQ ID NO:1191 and a VL1 having an amino acid sequence of SEQ ID NO:1195; a VH1 having an amino acid sequence of SEQ ID NO:1199 and a VL1 having an amino acid sequence of SEQ ID NO:1203; a VH1 having an amino acid sequence of SEQ ID NO:1207 and a VL1 having an amino acid sequence of SEQ ID NO:1211; a VH1 having an amino acid sequence of SEQ ID NO:1215 and a VL1 having an amino acid sequence of SEQ ID NO:1219; a VH1 having an amino acid sequence of SEQ ID NO:1223 and a VL1 having an amino acid sequence of SEQ ID NO:1227; a VH1 having an amino acid sequence of SEQ ID NO:1231 and a VL1 having an amino acid sequence of SEQ ID NO:1235; a VH1 having an amino acid sequence of SEQ ID NO:1239 and a VL1 having an amino acid sequence of SEQ ID NO:1243; a VH1 having an amino acid sequence of SEQ ID NO:1247 and a VL1 having an amino acid sequence of SEQ ID NO:1251; a VH1 having an amino acid sequence of SEQ ID NO:1255 and a VL1 having an amino acid sequence of SEQ ID NO:1259; a VH1 having an amino acid sequence of SEQ ID NO:1263 and a VL1 having an amino acid sequence of SEQ ID NO:1267; a VH1 having an amino acid sequence of SEQ ID NO:1271 and a VL1 having an amino acid sequence of SEQ ID NO:1275; a VH1 having an amino acid sequence of SEQ ID NO:1279 and a VL1 having an amino acid sequence of SEQ ID NO:1283; a VH1 having an amino acid sequence of SEQ ID NO:1287 and a VL1 having an amino acid sequence of SEQ ID NO:1291; a VH1 having an amino acid sequence of SEQ ID NO:1295 and a VL1 having an amino acid sequence of SEQ ID NO:1299; and a VH1 having an amino acid sequence of SEQ ID NO:1303 and a VL1 having an amino acid sequence of SEQ ID NO:1307.

[0010] In exemplary embodiments, the second ABD binds to human CD28, wherein the amino acid sequence of the VH2 is selected from the group consisting of: SEQ ID NO:998, SEQ ID NO:984, SEQ ID NO:994 and SEQ ID NOs:561-629 or a variant thereof, and wherein the amino acid sequence of the VL2 is selected from the group consisting of: SEQ ID NO:1002, SEQ ID NO:984, and SEQ ID NOs:630-735 or a variant thereof.

[0011] In exemplary embodiments, the second ABD binds PD-L1, and the VH2 and VL2 are selected from the group consisting of: a VH2 having an amino acid sequence of SEQ ID NO:1030 and a VL2 having an amino acid sequence of SEQ ID NO:1034; a VH2 having an amino acid sequence of SEQ ID NO:1006 and a VL2 having an amino acid sequence of SEQ ID NO:1010; a VH2 having an amino acid sequence of SEQ ID NO:1014 and a VL2 having an amino acid sequence of SEQ ID NO:1018; and a VH2 having an amino acid sequence of SEQ ID NO:1022 and a VL2 having an amino acid sequence of SEQ ID NO:1026.

[0012] In some embodiments, the first Fc domain and second Fc domain are each variant Fc domains. In some embodiments, the first and second Fc domains comprise a set of heterodimerization skew variants selected from the following heterodimerization variants: S364K/E357Q: L368D/K370S; S364K: L368D/K370S; S364K: L368E/K370S; D401K: T411E/K360E/Q362E; and T366W: T366S/L368A/Y407V, wherein numbering is according to EU numbering. In exemplary embodiments, the first and second Fc domains comprise heterodimerization skew variants S364K/E357Q: L368D/K370S.

[0013] In some embodiments, the first and second Fc domains each comprise one or more ablation variants. In some embodiments, the one or more ablation variants are E233P/L234V/L235A/G236del/S267K, wherein numbering is according to EU numbering.

[0014] In some embodiments, one of the first or second monomer further comprises one or more pI variants. In exemplary embodiments, the CH1-hinge-CH2-CH3 of the second monomer comprises pI variants N208D/Q295E/N384D/Q418E/N421D, wherein numbering is according to EU numbering.

[0015] In certain embodiments, the CH1-hinge-CH2-CH3 of the second monomer comprises amino acid variants L368D/K370S/N208D/Q295E/N384D/Q418E/N421D/E233P/L234V/L235A/G236del/S267K, the first Fc domain comprises amino acid variants S364K/E357Q/E233P/L234V/L235A/G236del/S267K, and the numbering is according to EU numbering.

[0016] In some embodiments, the first and second Fc domains each comprise amino acid variants 428L/434S.

[0017] In one aspect, provided herein is heterodimeric antibody that comprises: a) a first monomer, b) a second monomer, and c) a light chain. The first monomer comprises from N- to C-terminus, VH1-CH1-first domain linker-scFv-second domain linker-CH2-CH3, wherein VH1 is a first variable heavy domain, and CH2-CH3 is a first Fc domain. The second monomer comprises from N- to C-terminus, a VH1-CH1-hinge-CH2-CH3, wherein CH2-CH3 is a second Fc domain. The light chain comprises from N- to C-terminus, VL1-CL, wherein VL1 is a variable light domain and CL is a constant light domain. Each of the VH1 domains and the first VL1 domain together form a first antigen binding domain (ABD). The scFv comprises a second VH domain (VH2), a scFv linker, and a second VL domain (VL2), and the VH2 and the VL2 form a second ABD. Further, one of the first and second ABDs bind human CD28 and the other of the first and second ABDs binds PD-L1.

[0018] In exemplary embodiments, the first ABDs bind human CD28 and the second ABD binds PD-L1. In some embodiments, the first ABDs bind PD-L1 and the second ABD binds human CD28.

[0019] In some embodiments, the scFv comprises, from N- to C-terminus, VL2-scFv linker-VH2. In other embodiments, the scFv comprises, from N- to C-terminus, VH2-scFv linker-VL2.

[0020] In some embodiments, the first ABDs bind PD-L1, wherein the amino acid sequence of the VH1 is selected from the group consisting of: SEQ ID NO:1079, SEQ ID NO:1042, SEQ ID NO:1055, SEQ ID NO:1059, SEQ ID NO:1063, SEQ ID NO: 1067, SEQ ID NO: 1071, SEQ ID NO: 1075, SEQ ID NO:1083, SEQ ID NO:1087, SEQ ID NO:1091, SEQ ID NO:1095, SEQ ID NO:1099, and SEQ ID NOs:736-797 or a variant thereof, and wherein the amino acid sequence of the VL1 is selected from the group consisting of: SEQ ID NO:1111, SEQ ID NO:1046, SEQ ID NO:1103, SEQ ID NO:1107, SEQ ID NO:1115, SEQ ID NO:1119, SEQ ID NO:1123, SEQ ID NO:1127, SEQ ID NO:1131, SEQ ID NO:1135, SEQ ID NO:1139, SEQ ID NO:1143, SEQ ID NO:1147, SEQ ID NO:1151, SEQ ID NO:1155, and SEQ ID NOs:798-868 or a variant thereof.

[0021] In some embodiments, the first ABDs bind PD-L1, and the VH1 and VL1 are selected from the group consisting of: a VH1 having an amino acid sequence of SEQ ID NO:1183 and a VL1 having an amino acid sequence of SEQ ID NO:1187; a VH1 having an amino acid sequence of SEQ ID NO:1042 and a VL1 having an amino acid sequence of SEQ ID NO:1047; a VH1 having an amino acid sequence of SEQ ID NO:1159 and a VL1 having an amino acid sequence of SEQ ID NO:1163; a VH1 having an amino acid sequence of SEQ ID NO:1167 and a VL1 having an amino acid sequence of SEQ ID NO:1171; a VH1 having an amino acid sequence of SEQ ID NO:1175 and a VL1 having an amino acid sequence of SEQ ID NO:1179; a VH1 having an amino acid sequence of SEQ ID NO:1191 and a VL1 having an amino acid sequence of SEQ ID NO:1195; a VH1 having an amino acid sequence of SEQ ID NO:1199 and a VL1 having an amino acid sequence of SEQ ID NO:1203; a VH1 having an amino acid sequence of SEQ ID NO:1207 and a VL1 having an amino acid sequence of SEQ ID NO:1211; a VH1 having an amino acid sequence of SEQ ID NO:1215 and a VL1 having an amino acid sequence of SEQ ID NO:1219; a VH1 having an amino acid sequence of SEQ ID NO:1223 and a VL1 having an amino acid sequence of SEQ ID NO:1227; a VH1 having an amino acid sequence of SEQ ID NO:1231 and a VL1 having an amino acid sequence of SEQ ID NO:1235; a VH1 having an amino acid sequence of SEQ ID NO:1239 and a VL1 having an amino acid sequence of SEQ ID NO:1243; a VH1 having an amino acid sequence of SEQ ID NO:1247 and a VL1 having an amino acid sequence of SEQ ID NO:1251; a VH1 having an amino acid sequence of SEQ ID NO:1255 and a VL1 having an amino acid sequence of SEQ ID NO:1259; a VH1 having an amino acid sequence of SEQ ID NO:1263 and a VL1 having an amino acid sequence of SEQ ID NO:1267; a VH1 having an amino acid sequence of SEQ ID NO:1271 and a VL1 having an amino acid sequence of SEQ ID NO:1275; a VH1 having an amino acid sequence of SEQ ID NO:1279 and a VL1 having an amino acid sequence of SEQ ID NO:1283; a VH1 having an amino acid sequence of SEQ ID NO:1287 and a VL1 having an amino acid sequence of SEQ ID NO:1291; a VH1 having an amino acid sequence of SEQ ID NO:1295 and a VL1 having an amino acid sequence of SEQ ID NO:1299; and a VH1 having an amino acid sequence of SEQ ID NO:1303 and a VL1 having an amino acid sequence of SEQ ID NO:1307.

[0022] In some embodiments, the second ABD binds to human CD28, wherein the amino acid sequence of the VH2 is selected from the group consisting of: SEQ ID NO:998, SEQ ID NO:984, SEQ ID NO:994 and SEQ ID NOs:561-629 or a variant thereof, and wherein the amino acid sequence of the VL2 is selected from the group consisting of: SEQ ID NO:1002, SEQ ID NO:984, and SEQ ID NOs:630-735 or a variant thereof.

[0023] In some embodiments, the second ABD binds PD-L1, and the VH2 and VL2 are selected from the group consisting of: a VH2 having an amino acid sequence of SEQ ID NO:1030 and a VL2 having an amino acid sequence of SEQ ID NO:1034; a VH2 having an amino acid sequence of SEQ ID NO:1006 and a VL2 having an amino acid sequence of SEQ ID NO:1010; a VH2 having an amino acid sequence of SEQ ID NO:1014 and a VL2 having an amino acid sequence of SEQ ID NO:1018; and a VH2 having an amino acid sequence of SEQ ID NO:1022 and a VL2 having an amino acid sequence of SEQ ID NO:1026.

[0024] In some embodiments, the first Fc domain and second Fc domain are each variant Fc domains. In some embodiments, the first and second Fc domains comprise a set of heterodimerization skew variants selected from the following heterodimerization variants: S364K/E357Q: L368D/K370S; S364K: L368D/K370S; S364K: L368E/K370S; D401K: T411E/K360E/Q362E; and T366W: T366S/L368A/Y407V, wherein numbering is according to EU numbering. In exemplary embodiments, the first and second Fc domains comprise heterodimerization skew variants S364K/E357Q: L368D/K370S.

[0025] In some embodiments, the first and second Fc domains each comprise one or more ablation variants. In some embodiments, the one or more ablation variants are E233P/L234V/L235A/G236del/S267K, wherein numbering is according to EU numbering.

[0026] In some embodiments, one of the first or second monomer further comprises one or more pI variants. In exemplary embodiments, the CH1-hinge-CH2-CH3 of the second monomer comprises pI variants N208D/Q295E/N384D/Q418E/N421D, wherein numbering is according to EU numbering.

[0027] In some embodiments, the CH1-hinge-CH2-CH3 of the second monomer comprises amino acid variants L368D/K370S/N208D/Q295E/N384D/Q418E/N421D/E233P/L234V/L235A/G236del/S267K, the first Fe domain comprises amino acid variants S364K/E357Q/E233P/L234V/L235A/G236del/S267K, and numbering is according to EU numbering.

[0028] In some embodiments, the first and second Fc domains each comprise amino acid variants 428L/434S.

[0029] In one aspect, provided herein is heterodimeric antibody that comprises: a) a first monomer, b) a second monomer, and c) a light chain. The first monomer comprises from N-terminus to C-terminus, VH1-CH1-hinge-CH2-CH3-domain linker-scFv, wherein VH1 is a first variable heavy domain, and CH2-CH3 is a first Fc domain. The second monomer comprises from N-terminus to C-terminus a VH1-CH1-hinge-CH2-CH3, wherein CH2-CH3 is a second Fc domain. The light chain comprises, from N-terminus to C-terminus, VL1-CL, wherein VL1 is a variable light domain and CL is a constant light domain. Each of the VH1 domain and the first VL1 domain together form a first antigen binding domain (ABD). The scFv comprises a second VH domain (VH2), a scFv linker, and a second VL domain (VL2), and the VH2 and the VL2 together form a second ABD. Further, one of the first and second ABDs bind human CD28 and the other of the first and second ABDs bind PD-L1.

[0030] In exemplary embodiments, the first ABDs bind human CD28 and the second ABD binds PD-L1. In some embodiments, the first ABDs bind PD-L1 and the second ABD binds human CD28.

[0031] In some embodiments, the scFv comprises, from N- to C-terminus, VL2-scFv linker-VH2. In exemplary embodiments, the scFv comprises, from N- to C-terminus, VH2-scFv linker-VL2.

[0032] In some embodiments, the first ABDs bind PD-L1, wherein the amino acid sequence of the VH1 is selected from the group consisting of: SEQ ID NO:1079, SEQ ID NO:1042, SEQ ID NO:1055, SEQ ID NO:1059, SEQ ID NO:1063, SEQ ID NO: 1067, SEQ ID NO: 1071, SEQ ID NO: 1075, SEQ ID NO:1083, SEQ ID NO:1087, SEQ ID NO:1091, SEQ ID NO:1095, SEQ ID NO:1099, and SEQ ID NOs:736-797 or a variant thereof, and wherein the amino acid sequence of the VL1 is selected from the group consisting of: SEQ ID NO:1111, SEQ ID NO:1046, SEQ ID NO:1103, SEQ ID NO:1107, SEQ ID NO:1115, SEQ ID NO:1119, SEQ ID NO:1123, SEQ ID NO:1127, SEQ ID NO:1131, SEQ ID NO:1135, SEQ ID NO:1139, SEQ ID NO:1143, SEQ ID NO:1147, SEQ ID NO:1151, SEQ ID NO:1155, and SEQ ID NOs:798-868 or a variant thereof.

[0033] In some embodiments, the first ABDs bind PD-L1, and the VH1 and VL1 are selected from the group consisting of: a VH1 having an amino acid sequence of SEQ ID NO:1183 and a VL1 having an amino acid sequence of SEQ ID NO:1187; a VH1 having an amino acid sequence of SEQ ID NO:1042 and a VL1 having an amino acid sequence of SEQ ID NO:1047; a VH1 having an amino acid sequence of SEQ ID NO:1159 and a VL1 having an amino acid sequence of SEQ ID NO:1163; a VH1 having an amino acid sequence of SEQ ID NO:1167 and a VL1 having an amino acid sequence of SEQ ID NO:1171; a VH1 having an amino acid sequence of SEQ ID NO:1175 and a VL1 having an amino acid sequence of SEQ ID NO:1179; a VH1 having an amino acid sequence of SEQ ID NO:1191 and a VL1 having an amino acid sequence of SEQ ID NO:1195; a VH1 having an amino acid sequence of SEQ ID NO:1199 and a VL1 having an amino acid sequence of SEQ ID NO:1203; a VH1 having an amino acid sequence of SEQ ID NO:1207 and a VL1 having an amino acid sequence of SEQ ID NO:1211; a VH1 having an amino acid sequence of SEQ ID NO:1215 and a VL1 having an amino acid sequence of SEQ ID NO:1219; a VH1 having an amino acid sequence of SEQ ID NO:1223 and a VL1 having an amino acid sequence of SEQ ID NO:1227; a VH1 having an amino acid sequence of SEQ ID NO:1231 and a VL1 having an amino acid sequence of SEQ ID NO:1235; a VH1 having an amino acid sequence of SEQ ID NO:1239 and a VL1 having an amino acid sequence of SEQ ID NO:1243; a VH1 having an amino acid sequence of SEQ ID NO:1247 and a VL1 having an amino acid sequence of SEQ ID NO:1251; a VH1 having an amino acid sequence of SEQ ID NO:1255 and a VL1 having an amino acid sequence of SEQ ID NO:1259; a VH1 having an amino acid sequence of SEQ ID NO:1263 and a VL1 having an amino acid sequence of SEQ ID NO:1267; a VH1 having an amino acid sequence of SEQ ID NO:1271 and a VL1 having an amino acid sequence of SEQ ID NO:1275; a VH1 having an amino acid sequence of SEQ ID NO:1279 and a VL1 having an amino acid sequence of SEQ ID NO:1283; a VH1 having an amino acid sequence of SEQ ID NO:1287 and a VL1 having an amino acid sequence of SEQ ID NO:1291; a VH1 having an amino acid sequence of SEQ ID NO:1295 and a VL1 having an amino acid sequence of SEQ ID NO:1299; and a VH1 having an amino acid sequence of SEQ ID NO:1303 and a VL1 having an amino acid sequence of SEQ ID NO:1307.

[0034] In some embodiments, the second ABD binds to human CD28, wherein the amino acid sequence of the VH2 is selected from the group consisting of: SEQ ID NO:998, SEQ ID NO:984, SEQ ID NO:994 and SEQ ID NOs:561-629 or a variant thereof, and wherein the amino acid sequence of the VL2 is selected from the group consisting of: SEQ ID NO:1002, SEQ ID NO:984, and SEQ ID NOs:630-735 or a variant thereof.

[0035] In exemplary embodiments, the second ABD binds PD-L1, and the VH2 and VL2 are selected from the group consisting of: a VH1 having an amino acid sequence of SEQ ID NO:1030 and a VL2 having an amino acid sequence of SEQ ID NO:1034; a VH1 having an amino acid sequence of SEQ ID NO:1006 and a VL2 having an amino acid sequence of SEQ ID NO:1010; a VH2 having an amino acid sequence of SEQ ID NO:1014 and a VL2 having an amino acid sequence of SEQ ID NO:1018; and a VH2 having an amino acid sequence of SEQ ID NO:1022 and a VL2 having an amino acid sequence of SEQ ID NO:1026.

[0036] In some embodiments, the first Fc domain and second Fc domain are each variant Fc domains. In some embodiments, the first and second Fc domains comprise a set of heterodimerization skew variants selected from the following heterodimerization variants: S364K/E357Q: L368D/K370S; S364K: L368D/K370S; S364K: L368E/K370S; D401K: T411E/K360E/Q362E; and T366W: T366S/L368A/Y407V, wherein numbering is according to EU numbering. In exemplary embodiments, the first and second Fc domains comprise heterodimerization skew variants S364K/E357Q: L368D/K370S.

[0037] In some embodiments, the first and second Fc domains each comprise one or more ablation variants. In some embodiments, the one or more ablation variants are E233P/L234V/L235A/G236del/S267K, wherein numbering is according to EU numbering.

[0038] In some embodiments, one of the first or second monomer further comprises one or more pI variants. In exemplary embodiments, the CH1-hinge-CH2-CH3 of the second monomer comprises pI variants N208D/Q295E/N384D/Q418E/N421D, wherein numbering is according to EU numbering.

[0039] In some embodiments, the CH1-hinge-CH2-CH3 of the second monomer comprises amino acid variants L368D/K370S/N208D/Q295E/N384D/Q418E/N421D/E233P/L234V/L235A/G236del/S267K, the first Fe domain comprises amino acid variants S364K/E357Q/E233P/L234V/L235A/G236del/S267K, and numbering is according to EU numbering.

[0040] In some embodiments, the first and second Fc domains each comprise amino acid variants 428L/434S.

[0041] In one aspect, provided herein is composition comprising an anti-PD-L1 Antigen Binding Domain (ABD) comprising: a variable heavy domain (VH) with an amino acid sequence selected from the group consisting of: SEQ ID NO:1079, SEQ ID NO:1042, SEQ ID NO:1055, SEQ ID NO:1059, SEQ ID NO:1063, SEQ ID NO: 1067, SEQ ID NO: 1071, SEQ ID NO: 1075, SEQ ID NO:1083, SEQ ID NO:1087, SEQ ID NO:1091, SEQ ID NO:1095, SEQ ID NO:1099, and SEQ ID NOs:736-797 or a variant thereof, and variable light domain (VL) with an amino acid sequence selected from the group consisting of: SEQ ID NO:1111, SEQ ID NO:1046, SEQ ID NO:1103, SEQ ID NO:1107, SEQ ID NO:1115, SEQ ID NO:1119, SEQ ID NO:1123, SEQ ID NO:1127, SEQ ID NO:1131, SEQ ID NO:1135, SEQ ID NO:1139, SEQ ID NO:1143, SEQ ID NO:1147, SEQ ID NO:1151, SEQ ID NO:1155, and SEQ ID NOs:798-868 or a variant thereof.

[0042] In another aspect, provided herein is a composition comprising an anti-PD-L1 Antigen Binding Domain (ABD) comprising a variable heavy domain (VH) and a variable light domain (VL) selected from the group consisting of: a VH having an amino acid sequence of SEQ ID NO:1183 and a VL having an amino acid sequence of SEQ ID NO:1187; a VH having an amino acid sequence of SEQ ID NO:1042 and a VL having an amino acid sequence of SEQ ID NO:1047; a VH having an amino acid sequence of SEQ ID NO:1159 and a VL having an amino acid sequence of SEQ ID NO:1163; a VH having an amino acid sequence of SEQ ID NO:1167 and a VL having an amino acid sequence of SEQ ID NO:1171; a VH having an amino acid sequence of SEQ ID NO:1175 and a VL having an amino acid sequence of SEQ ID NO:1179; a VH having an amino acid sequence of SEQ ID NO:1191 and a VL having an amino acid sequence of SEQ ID NO:1195; a VH having an amino acid sequence of SEQ ID NO:1199 and a VL having an amino acid sequence of SEQ ID NO:1203; a VH having an amino acid sequence of SEQ ID NO:1207 and a VL having an amino acid sequence of SEQ ID NO:1211; a VH having an amino acid sequence of SEQ ID NO:1215 and a VL having an amino acid sequence of SEQ ID NO:1219; a VH having an amino acid sequence of SEQ ID NO:1223 and a VL having an amino acid sequence of SEQ ID NO:1227; a VH having an amino acid sequence of SEQ ID NO:1231 and a VL having an amino acid sequence of SEQ ID NO:1235; a VH having an amino acid sequence of SEQ ID NO:1239 and a VL having an amino acid sequence of SEQ ID NO:1243; a VH having an amino acid sequence of SEQ ID NO:1247 and a VL having an amino acid sequence of SEQ ID NO:1251; a VH having an amino acid sequence of SEQ ID NO:1255 and a VL having an amino acid sequence of SEQ ID NO:1259; a VH having an amino acid sequence of SEQ ID NO:1263 and a VL having an amino acid sequence of SEQ ID NO:1267; a VH having an amino acid sequence of SEQ ID NO:1271 and a VL having an amino acid sequence of SEQ ID NO:1275; a VH having an amino acid sequence of SEQ ID NO:1279 and a VL having an amino acid sequence of SEQ ID NO:1283; a VH having an amino acid sequence of SEQ ID NO:1287 and a VL having an amino acid sequence of SEQ ID NO:1291; a VH having an amino acid sequence of SEQ ID NO:1295 and a VL having an amino acid sequence of SEQ ID NO:1299; and a VH having an amino acid sequence of SEQ ID NO:1303 and a VL having an amino acid sequence of SEQ ID NO:1307.

[0043] In one aspect, provided herein is a composition comprising an anti-PD-L1 Antigen Binding Domain (ABD) comprising a variable heavy domain having an amino acid sequence of SEQ ID NO:1183 and a variable light domain having an amino acid sequence of SEQ ID NO: 1187.

[0044] In one aspect, provided herein is a composition comprising an anti-PD-L1 Antigen Binding Domain (ABD) comprising a variable heavy domain having an amino acid sequence of SEQ ID NO:1042 and a variable light domain having an amino acid sequence of SEQ ID NO: 1047.

[0045] In one aspect, provided herein is a composition comprising an anti-PD-L1 Antigen Binding Domain (ABD) comprising a variable heavy domain having an amino acid sequence of SEQ ID NO:1159 and a variable light domain having an amino acid sequence of SEQ ID NO: 1163.

[0046] In some embodiments, the composition is an antibody comprising: a) a heavy chain comprising, from N- to C-terminus: VH-CH1-hinge-CH2-CH3, wherein VH is the variable heavy domain and CH1-hinge-CH2-CH3 is heavy chain constant domain; and b) a light chain comprising from N- to C-terminus: VL-CL, wherein VL is the variable light domain and CL is a light chain constant domain.

[0047] Also provided herein are nucleic acid compositions encoding the compositions and antibodies provided herein, expression vectors that include such nucleic acids, and host cells that include the nucleic acids and expression vectors.

[0048] In another aspect, provided herein is a method of treating a cancer that includes administering to a patient in need thereof one of the subject antibodies provided herein. In some embodiments, the method further includes administering an anti-CD3×tumor target antigen bispecific antibody to the patient.

### BRIEF DESCRIPTION OF THE DRAWINGS

[0049] FIGS. 1A and 1B depict the sequences for human, mouse, and cynomolgus CD28. Such CD28 are useful for the development of cross-reactive CD28 antigen binding domains for ease of clinical development.

[0050] FIG. 2 depicts the sequences for human, mouse, and cynomolgus PD-L1. Such PD-L1 are useful for the development of cross-reactive CD28 antigen binding domains for ease of clinical development.

[0051] FIG. 3A-3F depict useful pairs of heterodimerization variant sets (including skew and pI variants). In FIG. 3F, there are variants for which there are no corresponding “monomer 2” variants. Such variants are pI variants that can be used alone on either monomer of a bispecific antibody (e.g., αPD-L1×αCD28 bsAb), or included, for example, on the non-scFv side of a format that utilizes an scFv as a component and an appropriate charged scFv linker can be used on the second monomer that utilizes an scFv as the CD28 binding domain. Suitable charged linkers are shown in FIG. 6.

[0052] FIG. 4 depicts a list of isosteric variant antibody constant regions and their respective substitutions. pI_(−) indicates lower pI variants, while pI_(+) indicates higher pI variants. These variants can be optionally and independently combined with other variants, including heterodimerization variants, outlined herein.

[0053] FIG. 5 depict useful ablation variants that ablate FcγR binding (also referred to as “knockouts” or “KO” variants). In some embodiments, such ablation variants are included in the Fc domain of both monomers of the subject antibody described herein. In other embodiments, the ablation variants are only included on only one variant Fc domain.

[0054] FIG. 6 depicts a number of charged scFv linkers that find use in increasing or decreasing the pI of the subject heterodimeric bispecific antibodies that utilize one or more scFv as a component, as described herein (e.g., a PD-L1×αCD28 bsAbs). The (+H) positive linker finds particular use herein, particularly with anti-CD28 VL and VH sequences shown herein. A single prior art scFv linker with a single charge is referenced as “Whitlow,” from Whitlow et al., Protein Engineering 6(8):989-995 (1993). It should be noted that this linker was used for reducing aggregation and enhancing proteolytic stability in scFvs. Such charged scFv linkers can be used in any of the subject antibody formats disclosed herein that include scFvs (e.g., 1+1 Fab-scFv-Fc and 2+1 Fab2-scFv-Fc formats).

[0055] FIG. 7 depicts a number of exemplary domain linkers. In some embodiments, these linkers find use linking a single-chain Fv to an Fc chain. In some embodiments, these linkers may be combined in any orientation. For example, a GGGGS linker may be combined with a “lower half hinge” linker at the N-terminus or at the C-terminus.

[0056] FIG. 8 shows a particularly useful embodiment of the heterodimeric Fc domains (i.e. CH2-CH3 in this embodiment) of the anti-CD28×anti-PD-L1 bsAbs of the invention

[0057] FIG. 9 depicts various heterodimeric skew variant amino acid substitutions that can be used with the heterodimeric antibodies described herein.

[0058] FIGS. 10A-10C show the sequences of several useful heterodimeric αB7-H3×αCD28 bsAb backbones based on human IgG1, without the cytokine sequences. Heterodimeric Fc backbone 1 is based on human IgG1 (356E/358M allotype), and includes the L368D/K370S skew variants and the Q295E/N384D/Q418E/N421D pI variants on a first heterodimeric Fc chain, the S364K/E357Q skew variants on a second heterodimeric Fc chain, and the E233P/L234V/L235A/G236del/S267K ablation variants on both chains. Heterodimeric Fc backbone 2 is based on human IgG1 (356E/358M allotype), and includes the L368D/K370S skew variants and the Q295E/N384D/Q418E/N421D pI variants on a first heterodimeric Fc chain, the S364K skew variant on a second heterodimeric Fc chain, and the E233P/L234V/L235A/G236del/S267K ablation variants on both chains. Heterodimeric Fc backbone 3 is based on human IgG1 (356E/358M allotype), and includes the L368E/K370S skew variants and the Q295E/N384D/Q418E/N421D pI variants on a first heterodimeric Fc chain, the S364K skew variant on a second heterodimeric Fc chain, and the E233P/L234V/L235A/G236del/S267K ablation variants on both chains. Heterodimeric Fc backbone 4 is based on human IgG1 (356E/358M allotype), and includes the K360E/Q362E/T411E skew variants and the Q295E/N384D/Q418E/N421D pI variants on a first heterodimeric Fc chain, the D401K skew variant on a second heterodimeric Fc chain, and the E233P/L234V/L235A/G236del/S267K ablation variants on both chains. Heterodimeric Fc backbone 5 is based on human IgG1 (356D/358L allotype), and includes the L368D/K370S skew variants and the Q295E/N384D/Q418E/N421D pI variants on a first heterodimeric Fc chain, the S364K/E357Q skew variants on a second heterodimeric Fc chain, and the E233P/L234V/L235A/G236del/S267K ablation variants on both chains. Heterodimeric Fc backbone 6 is based on human IgG1 (356E/358M allotype), and includes the L368D/K370S skew variants and the Q295E/N384D/Q418E/N421D pI variants on a first heterodimeric Fc chain, the S364K/E357Q skew variants on a second heterodimeric Fc chain, and the E233P/L234V/L235A/G236del/S267K ablation variants and N297A variant that removes glycosylation on both chains. Heterodimeric Fc backbone 7 is based on human IgG1 (356E/358M allotype), and includes the L368D/K370S skew variants and the Q295E/N384D/Q418E/N421D pI variants on a first heterodimeric Fc chain, the S364K/E357Q skew variants on a second heterodimeric Fc chain, and the E233P/L234V/L235A/G236del/S267K ablation variants and N297S variant that removes glycosylation on both chains. Heterodimeric Fc backbone 8 is based on human IgG4, and includes the L368D/K370S skew variants and the Q295E/N384D/Q418E/N421D pI variants on a first heterodimeric Fc chain, the S364K/E357Q skew variants on a second heterodimeric Fc chain, and the S228P (according to EU numbering, S241P in Kabat) variant that ablates Fab arm exchange (as is known in the art) on both chains. Heterodimeric Fc backbone 9 is based on human IgG2, and includes the L368D/K370S skew variants and the Q295E/N384D/Q418E/N421D pI variants on a first heterodimeric Fc chain, the S364K/E357Q skew variants on a second heterodimeric Fc chain. Heterodimeric Fc backbone 10 is based on human IgG2, and includes the L368D/K370S skew variants and the Q295E/N384D/Q418E/N421D pI variants on a first heterodimeric Fc chain, the S364K/E357Q skew variants on a second heterodimeric Fc chain, and the S267K ablation variant on both chains. Heterodimeric Fc backbone 11 is based on human IgG1 (356E/358M allotype), and includes the L368D/K370S skew variants and the Q295E/N384D/Q418E/N421D pI variants on a first heterodimeric Fc chain, the S364K/E357Q skew variants on a second heterodimeric Fc chain, and the E233P/L234V/L235A/G236del/S267K ablation variants and M428L/N434S Xtend variants on both chains. Heterodimeric Fc backbone 12 is based on human IgG1 (356E/358M allotype), and includes the L368D/K370S skew variants on a first heterodimeric Fc chain, the S364K/E357Q skew variants and P217R/P229R/N276K pI variants on a second heterodimeric Fc chain, and the E233P/L234V/L235A/G236del/S267K ablation variants on both chains.

[0059] Included within each of these backbones are sequences that are 90, 95, 98 and 99% identical (as defined herein) to the recited sequences, and/or contain from 1, 2, 3, 4, 5, 6, 7, 8, 9 or 10 additional amino acid substitutions (as compared to the “parent” of the Figure, which, as will be appreciated by those in the art, already contain a number of amino acid modifications as compared to the parental human IgG1 (or IgG2 or IgG4, depending on the backbone). That is, the recited backbones may contain additional amino acid modifications (generally amino acid substitutions) in addition or as an alternative to the skew, pI and ablation variants contained within the backbones of this Figure. Additionally, the backbones depicted herein may include deletion of the C-terminal glycine (K446_) and/or lysine (K447_). The C-terminal glycine and/or lysine deletion may be intentionally engineered to reduce heterogeneity or in the context of certain bispecific formats, such as the mAb-scFv format. Additionally, C-terminal glycine and/or lysine deletion may occur naturally for example during production and storage.

[0060] FIG. 11 depicts illustrative sequences of heterodimeric B7H3×CD28 bsAb backbone for use in the 2+1 mAb-scFv format. The format depicted here is based on heterodimeric Fc backbone 1 as depicted in Figure X, except further including G446_on monomer 1 (−) and G446_/K447_on monomer 2 (+). It should be noted that any of the additional backbones depicted in Figure X may be adapted for use in the 2+1 mAb-scFv format with or without including K447_on one or both chains. It should be noted that these sequences may further include the M428L/N434S variants.

[0061] FIG. 12 depicts sequences for “CH1+ hinge” that find use in embodiments of a PD-L1×αCD28 bsAbs that utilize a Fab binding domain. The “CH1+ hinge” sequences find use linking the variable heavy domain (VH) to the Fc backbones (as depicted in FIG. 10). For particular embodiments wherein the Fab is on the (+) side, the “CH1(+)+ hinge” sequences may find use. For particular embodiments wherein the Fab is on the (−) side, the “CH1(−)+ hinge” sequences may find use.

[0062] FIG. 13 depicts sequences for “CH1+half hinge” domain linker that find use in embodiments of a PD-L1×αCD28 bsAbs in the 2+1 Fab2-scFv-Fc format or 2+1 CLC format. In the 2+1 Fab2-scFv-Fc format, the “CH1+half hinge” sequences find use linking the variable heavy domain (VH) to the scFv domain on the Fab-scFv-Fc side of the bispecific antibody. In the 2+1 CLC format, the “CH1+half hinge” sequences find use linking the first variable heavy domain (VH) to the second VH domain on the Fab-Fab-Fc side of the bispecific antibody. It should be noted that other linkers may be used in place of the “CH1+half hinge”. It should also be noted that although the sequences here are based on the IgG1 sequence, equivalents can be constructed based on the IgG2 or IgG4 sequences.

[0063] FIG. 14 depicts sequences for “CH1” that find use in embodiments of αPDL1×αCD28 bsAbs.

[0064] FIG. 15 depicts sequences for “hinge” that find use in embodiments of αPDL1×αCD28 bsAbs.

[0065] FIG. 16 depicts the constant domain of the cognate light chains that find use in the subject αPD-L1×αCD28 bsAbs that utilize a Fab binding domain.

[0066] FIG. 17 depicts the sequences for XENP16432, an anti-PD-1 mAb based on nivolumab and IgG1 backbone with E233P/L234V/L235A/G236del/S267K ablation variant. CDRs are underlined and slashes indicate the border(s) between the variable regions and constant domain.

[0067] FIG. 18 depicts the variable heavy and variable light chain sequences for 1A7, an exemplary phage-derived CD28 binding domain, as well as the sequences for XENP28428, an anti-CD28 mAb based on 1A7 and IgG1 backbone with E233P/L234V/L235A/G236del/S267K ablation variant. CDRs are underlined and slashes indicate the border(s) between the variable regions and constant domain. As noted herein and is true for every sequence herein containing CDRs, the exact identification of the CDR locations may be slightly different depending on the numbering used as is shown in Table 2, and thus included herein are not only the CDRs that are underlined but also CDRs included within the VH and VL domains using other numbering systems. Furthermore, as for all the sequences in the Figures, these VH and VL sequences can be used either in a scFv format or in a Fab format.

[0068] FIG. 19 depicts the sequences for affinity-optimized variable heavy domains from anti-CD28 clone 1A7. It should be noted that the variable heavy domains can be paired with any of the other variable light domains depicted herein including SEQ ID NO: 1002 (e.g. 1A7_H1.1_L1.71 as utilized in XENP37559).

[0069] FIG. 20 depicts the sequences for affinity-optimized variable light domain from anti-CD28 clone 1A7. It should be noted that the variable light domains can be paired with any of the other variable heavy domains depicted herein including SEQ ID NOs: 999 and 998 (e.g. 1A7_H1.1_L1.71 as utilized in XENP37559).

[0070] FIGS. 21A and 21B depict the sequence for illustrative affinity-optimized 1A7 VH/VH pairs. It should be noted that these pairs may be formatted as Fabs or as scFvs.

[0071] FIG. 22 depicts illustrative affinity-engineered 1A7 VH/VL pairs and their binding affinities in the context of scFvs (in the context of 1+1 Fab-scFv-Fc bsAb format).

[0072] FIG. 23 depicts the sequences for XENP27181, a bivalent anti-CD28 mAb based on HuTN228 binding domain and IgG1 backbone with E233P/L234V/L235A/G236del/S267K ablation variant; and XENP27656, a monovalent anti-CD28 mAb based on HuTN228 binding domain (formatted as an scFv) and IgG1 backbone with E233P/L234V/L235A/G236del/S267K ablation variant. CDRs are underlined and slashes indicate the border(s) between the variable regions and constant domain. As noted herein and is true for every sequence herein containing CDRs, the exact identification of the CDR locations may be slightly different depending on the numbering used as is shown in Table 2, and thus included herein are not only the CDRs that are underlined but also CDRs included within the VH and VL domains using other numbering systems. Furthermore, as for all the sequences in the Figures, these VH and VL sequences can be used either in a scFv format or in a Fab format.

[0073] FIG. 24 depicts KDapp (KD apparent due to bivalent binding) of various CD28 binding phage clones (formatted as bivalent mAbs) for human CD28 as determined by Octet. First 60 seconds of dissociation was used for data fit.

[0074] FIG. 25 depicts binding of illustrative bivalent anti-CD28 mAbs based on phage-derived clones on human PBMCs. The data show that the phage campaign generated CD28 binding domains having weaker maximum binding than prior art HuTN228 (which is related to the humanized CD28 binding domains described in Example 1A).

[0075] FIGS. 26A-26E depicts a couple of formats of the present invention. FIG. 26A depicts the “1+1 Fab-scFv-Fc” format, with a first Fab arm binding a first antigen and a second scFv arm binding second antigen. The 1+1 Fab-scFv-Fc format comprises a first monomer comprising a first heavy chain variable region (VH1) covalently attached to the N-terminus of a first heterodimeric Fc backbone (optionally via a linker), a second monomer comprising a single-chain Fv covalently attached to the N-terminus of a second corresponding heterodimeric Fc backbone (optionally via a linker), and a third monomer comprising a light chain variable region covalently to a light chain constant domain, wherein the light chain variable region is complementary to the VH1. FIG. 26B depicts the “2+1 Fab2-scFv-Fc” format, with a first Fab arm and a second Fab-scFv arm, wherein the Fab binds a first antigen and the scFv binds second antigen. The 2+1 Fab2-scFv-Fc format comprises a first monomer comprising a first heavy chain variable region (VH1) covalently attached to the N-terminus of a first heterodimeric Fc backbone (optionally via a linker), a second monomer comprising the VH1 covalently attached (optionally via a linker) to a single-chain Fv covalently attached (optionally via a linker) to the N-terminus of a second corresponding heterodimeric Fc backbone, and a third monomer comprising a light chain variable region covalently to a light chain constant domain, wherein the light chain variable region is complementary to the VH1. FIG. 26C depicts the “1+1 Common Light Chain” or “1+1 CLC” format, with a first Fc comprising a first Fab arm binding a first antigen and a second Fc comprising a second Fab arm binding second antigen. The 1+1 CLC format comprises a first monomer comprising VH1-CH1-hinge-CH2-CH3, a second monomer comprising VH2-CH1-hinge-CH2-CH3, and a third monomer comprising VL-CL. The VL pairs with the VH1 to form a binding domain with a first antigen binding specificity; and the VL pairs with the VH2 to form a binding domain with a second antigen binding specificity. FIG. 26D depicts the “2+1 Common Light Chain” or “2+1 CLC” format, with a first Fc comprising 2 Fab arms each binding a first antigen and a second Fc comprising 1 Fab arm binding a second antigen. The 2+1 CLC format comprises a first monomer comprising VH1-CH1-hinge-VH1-CH1-hinge-CH2-CH3, a second monomer comprising VH2-CH1-hinge-CH2-CH3, and a third monomer comprising VL-CL. The VL pairs with the first and second VH1 to form binding domains with a first antigen binding specificity; and the VL pairs with the VH2 to form a binding domain with a second antigen binding specificity. FIG. 26E depicts the “2+1 mAb-scFv” format, with a first Fc comprising an N-terminal Fab arm binding a first antigen and a second Fc comprising an N-terminal Fab arm binding the first antigen and a C-terminal scFv binding a second antigen. The 2+1 mAb-scFv format comprises a first monomer comprising VH1-CH1-hinge-CH2-CH3, a second monomer comprising VH1-CH1-hinge-CH2-CH3-scFv, and a third monomer comprising VL-CL. The VL pairs with the first and second VH1 to form binding domains with binding specificity for the first antigen.

[0076] FIGS. 27A-27E depicts a couple of formats of the present invention as utilized in CD28 bispecific antibodies. FIG. 27A depicts the “1+1 Fab-scFv-Fc” format, with a first Fab arm binding a tumor-associated antigen and a second scFv arm binding CD28. The 1+1 Fab-scFv-Fc format comprises a first monomer comprising a first heavy chain variable region (VH1) covalently attached to the N-terminus of a first heterodimeric Fc backbone (optionally via a linker), a second monomer comprising a single-chain Fv covalently attached to the N-terminus of a second corresponding heterodimeric Fc backbone (optionally via a linker), and a third monomer comprising a light chain variable region covalently to a light chain constant domain, wherein the light chain variable region is complementary to the VH1. FIG. 27B depicts the “2+1 Fab₂-scFv-Fc” format, with a first Fab arm and a second Fab-scFv arm, wherein the Fab binds a tumor-associated antigen and the scFv binds CD28. The 2+1 Fab₂-scFv-Fc format comprises a first monomer comprising a first heavy chain variable region (VH1) covalently attached to the N-terminus of a first heterodimeric Fc backbone (optionally via a linker), a second monomer comprising the VH1 covalently attached (optionally via a linker) to a single-chain Fv covalently attached (optionally via a linker) to the N-terminus of a second corresponding heterodimeric Fc backbone, and a third monomer comprising a light chain variable region covalently to a light chain constant domain, wherein the light chain variable region is complementary to the VH1. FIG. 27C depicts the “1+1 Common Light Chain” or “1+1 CLC” format, with a first Fc comprising a first Fab arm binding a tumor-associated antigen and a second Fc comprising a second Fab arm binding CD28. The 1+1 CLC format comprises a first monomer comprising VH1-CH1-hinge-CH2-CH3, a second monomer comprising VH2-CH1-hinge-CH2-CH3, and a third monomer comprising VL-CL. The VL pairs with the VH1 to form a binding domain with a first antigen binding specificity; and the VL pairs with the VH2 to form a binding domain with a second antigen binding specificity. FIG. 27D depicts the “2+1 Common Light Chain” or “2+1 CLC” format, with a first Fc comprising 2 Fab arms each binding a tumor-associated antigen and a second Fc comprising 1 Fab arm binding CD28. The 2+1 CLC format comprises a first monomer comprising VH1-CH1-hinge-VH1-CH1-hinge-CH2-CH3, a second monomer comprising VH2-CH1-hinge-CH2-CH3, and a third monomer comprising VL-CL. The VL pairs with the first and second VH1 to form binding domains with a first antigen binding specificity; and the VL pairs with the VH2 to form a binding domain with a second antigen binding specificity. FIG. 27E depicts the “2+1 mAb-scFv” format, with a first Fc comprising an N-terminal Fab arm binding a tumor-associated antigen and a second Fc comprising an N-terminal Fab arm binding a tumor-associated antigen and a C-terminal scFv binding CD28. The 2+1 mAb-scFv format comprises a first monomer comprising VH1-CH1-hinge-CH2-CH3, a second monomer comprising VH1-CH1-hinge-CH2-CH3-scFv, and a third monomer comprising VL-CL. The VL pairs with the first and second VH1 to form binding domains with binding specificity for the tumor-associated antigen.

[0077] FIG. 28 depicts the variable heavy and variable light chain sequences for 2G4, an exemplary humanized hybridoma-derived PD-L1 binding domain, as well as the sequences for XENP25859, an anti-PD-L1 mAb based on 2G4 and IgG1 backbone with E233P/L234V/L235A/G236del/S267K ablation variant, and XENP36627, a monovalent anti-PD-L1 mAb based on 2G4. CDRs are underlined and slashes indicate the border(s) between the variable regions and constant domain. As noted herein and is true for every sequence herein containing CDRs, the exact identification of the CDR locations may be slightly different depending on the numbering used as is shown in Table 2, and thus included herein are not only the CDRs that are underlined but also CDRs included within the VH and VL domains using other numbering systems. Furthermore, as for all the sequences in the Figures, these VH and VL sequences can be used either in a scFv format or in a Fab format.

[0078] FIGS. 29A-29C depict the sequences for affinity-optimized variable heavy domains from anti-PDL1 clone 2G4. It should be noted that the variable heavy domains can be paired with any of the other variable light domains depicted herein including SEQ ID NOs: 1046 and 1103-1155 (see FIGS. 28 and 30A-30C, e.g. 2G4_H1.12_L1.14 as utilized in XENP40706).

[0079] FIGS. 30A-30C depict the sequences for affinity-optimized variable light domain from anti-PDL1 clone 2G4. It should be noted that the variable light domains can be paired with any of the other variable heavy domains depicted herein including SEQ ID NOs: 1042 and 1055-1099 (see FIGS. 28 and 29A-29C, e.g. 2G4_H1.12_L1.14 as utilized in XENP40706).

[0080] FIGS. 31A-31G depict the sequence for illustrative affinity-optimized 2G4 VH/VL pairs. It should be noted that these pairs may be formatted as Fabs or as scFvs.

[0081] FIG. 32 depicts A) classic T cell/APC interaction and B) replication of the classic T cell/APC interaction by combining CD3 bispecific antibodies with CD28 bispecific antibodies. In classic T cell/APC interaction, there is a first signal provided by TCR reactivity with peptide-MHC (Signal 1) and a second signal provided by CD28 crosslinking by CD80/CD86 being expressed on APCs (Signal 2) which together fully activate T cells. In contrast in treatment with CD3 bispecifics, only the first signal is provided. The CD28 signal may be provided by a CD28 bispecific with the idea to promote activation and proliferation through CD28 costimulation.

[0082] FIG. 33 depicts the introduction of CD28 signaling by a CD28 bispecific antibody and mitigation of any checkpoint mediated repression of the added CD28 signal by checkpoint blockade (e.g. PD-1 blockade).

[0083] FIG. 34 depicts that PD-L1×CD28 bispecific antibodies provide Signal 2 while advantageously further enabling blockade of PD-L1:PD1 interaction.

[0084] FIGS. 35A-35S depict the sequences for illustrative αPD-L1×αCD28 bsAbs in the 1+1 Fab-scFv-Fc format. CDRs are underlined, linkers are double-underlined, and slashes indicate the border(s) between the variable regions, Fc regions, and constant domains. It should be noted that the αPD-L1×αCD28 bsAbs can utilize variable region, Fc region, and constant domain sequences that are 90, 95, 98 and 99% identical (as defined herein), and/or contain from 1, 2, 3, 4, 5, 6, 7, 8, 9 or 10 amino acid substitutions. In addition, each sequence outlined herein can include or exclude the M428L/N434S variants in one or preferably both Fc domains, which including M428L/N434S results in longer half-life in serum.

[0085] FIG. 36 depicts the sequences for illustrative αPD-L1×αCD28 bsAbs in the 2+1 Fab₂-scFv-Fc format. CDRs are underlined, linkers are double-underlined, and slashes indicate the border(s) between the variable regions, Fc regions, and constant domains. The scFv domain has orientation (N- to C-terminus) of VH-scFv linker-VL, although this can be reversed. It should be noted that the scFv domain sequences includes as the scFv linker between the variable heavy and variable light region the sequence/GKPGSGKPGSGKPGSGKPGS/(SEQ ID NO:892); however, this linker can be replaced with any of the scFv linkers in FIG. 6. It should also be noted that the Chain 2 sequences include as the domain linker between the C-terminus of the scFv and the N-terminus of the CH2 domain the sequence GGGGSGGGGSKTHTCPPCP (SEQ ID NO:930), which is a “flex half hinge” domain linker; however, this linker can be replaced with any of the “useful domain linkers” of FIG. 7. It should be noted that the αPD-L1×αCD28 bsAbs can utilize variable region, Fc region, and constant domain sequences that are 90, 95, 98 and 99% identical (as defined herein), and/or contain from 1, 2, 3, 4, 5, 6, 7, 8, 9 or 10 amino acid substitutions. In addition, each sequence outlined herein can include or exclude the M428L/N434S variants in one or preferably both Fc domains, which results in longer half-life in serum.

[0086] FIG. 37 depicts the sequences for illustrative αPDL1×αCD28 bsAbs in the 2+1 mAb-scFv format. CDRs are underlined and slashes indicate the border(s) between the variable regions, linkers, Fc regions, and constant domains. The scFv domain has orientation (N- to C-terminus) of VH-scFv linker-V_{L}, although this can be reversed. It should be noted that the Chain 2 sequences include as a domain linker the sequence/GKPGSGKPGSGKPGSGKPGS/(SEQ ID NO:892); however, this linker can be replaced with any domain linker include any of the “useful domain linkers” of FIG. 6. It should be noted that the αPDL1×αCD28 bsAbs can utilize variable region, Fc region, and constant domain sequences that are 90, 95, 98 and 99% identical (as defined herein), and/or contain from 1, 2, 3, 4, 5, 6, 7, 8, 9 or 10 amino acid substitutions. In addition, each sequence outlined herein can include or exclude the M428L/N434S variants in one or preferably both Fc domains, which results in longer half-life in serum.

[0087] FIG. 38 depicts the sequences for XENP24118, an anti-PD-L1 mAb based on avelumab and IgG1 backbone with E233P/L234V/L235A/G236del/S267K ablation variant. CDRs are underlined and slashes indicated border(s) between the variable region and constant domain.

[0088] FIG. 39 depicts expansion of CMV+ T cells following incubation of NLV-loaded MDA-MB-231 cancer cells with CD3+ T cells purified from a CMV+ donor and either αPD-L1 antibody XENP24118 or αPD-L1×αCD28 bsAb XENP34963. αPD-L1×αCD28 bsAb XENP34963 significantly enhanced T cell expansion in comparison to PD-L1 blockade alone.

[0089] FIG. 40 depicts induction of A) IL-2 secretion, B) IFNγ secretion, and C) CD3+ T cell expansion by 1 μg/ml αB7H3×αCD3 bsAb in combination with αPD-L1 mAb XENP24118 or in combination with αPD-L1×αCD28 bsAb XENP34963. αPD-L1×αCD28 bsAb enhances activity of a CD3 bsAb T cell engager.

[0090] FIGS. 41A and 41B depict the sequences for illustrative αPSMA×αCD3 bsAbs in the 2+1 Fab₂-scFv-Fc format and respectively comprising a H1.30_L1.47 anti-CD3 scFv (a.k.a. CD3 High [VHVL]) or a L1.47_H1.32 anti-CD3 scFv (a.k.a. CD3 High-Int #1 [VLVH]). CDRs are underlined and slashes indicate the border(s) between the variable regions and other chain components (e.g. constant region and domain linkers). It should be noted that the αPSMA×αCD3 bsAbs can utilize variable region, Fc region, and constant domain sequences that are 90, 95, 98 and 99% identical (as defined herein), and/or contain from 1, 2, 3, 4, 5, 6, 7, 8, 9 or 10 amino acid substitutions. In addition, each sequence outlined herein can include or exclude the M428L/N434S variants in one or preferably both Fc domains, which results in longer half-life in serum.

[0091] FIG. 42 depicts cell kill over time following incubation of LNCaP cancer cells (PSMA+) with CD3+ T cells at a 1:1 effector:target ratio and illustrative CD3 bispecific (αPSMA×αCD3 XENP32220) alone or in combination with XENP36233. The data show that XENP32220 enhanced cell kill in comparison to incubation of cancer and T cells alone; however, addition of αPD-L1×αCD28 overcomes cancer cell resistance to the CD3 bispecific and further enhances cell kill.

[0092] FIGS. 43A-43B depicts group median change in tumor volume (as determined by caliper measurement; baseline corrected) A) over time (in days after first dose) and B) Day 20 (after first dose) in MC38 (engineered to stably expressing human PD-L1) and huPBMC-engrafted human CD28 knock-in mice dosed with 5 mg/kg αPD-L1 mAb XENP24118, 8.3 mg/kg αPD-L1×αCD28 bsAb XENP34963, 6 mg/kg αPD-L1×αCD28 XENP34961, or PBS control.

[0093] FIGS. 44A-44L depict sequences for exemplary anti-CD3 binding domains suitable for use in CD3 bispecific antibodies which may be combined with the CD28 bispecific antibodies of the invention. The CDRs are underlined, the scFv linker is double underlined (in the sequences, the scFv linker is a positively charged scFv (GKPGS)₄ linker (SEQ ID NO:892), although as will be appreciated by those in the art, this linker can be replaced by other linkers, including uncharged or negatively charged linkers, some of which are depicted in FIG. 6), and the slashes indicate the border(s) of the variable domains. In addition, the naming convention illustrates the orientation of the scFv from N- to C-terminus. As noted herein and is true for every sequence herein containing CDRs, the exact identification of the CDR locations may be slightly different depending on the numbering used as is shown in Table 2, and thus included herein are not only the CDRs that are underlined but also CDRs included within the VH and VL domains using other numbering systems. Furthermore, as for all the sequences in the Figures, these VH and VL sequences can be used either in a scFv format or in a Fab format.

[0094] FIG. 45 depicts the sequence for XENP29154 a.k.a. TGN1412.

[0095] FIG. 46 depicts the release of IFNγ from human PBMCs treated with air-dried XENP28428 (anti-CD28 clone 1A7), TGN1412 (XENP29154), or negative control PBS.

[0096] FIG. 47 depicts the dissociation constant (K_{D}— as an average of result from HIS1K capture vs. streptavidin capture) and corresponding sensorgrams (either HIS1K capture or streptavidin capture) of αPDL1×αCD28 bsAbs having affinity-engineered CD28 binding domains.

[0097] FIG. 48 depicts PD1:PDL1 blockade (binding of PDL1-mFc fusion to PD1-transfected HEK293T cells) by anti-PDL1 clone 2G4 (XENP25859), a partial blocking anti-PDL1 (XENP25853), a non-blocking anti-PDL1 (XENP25858), and XENP24118 (a benchmark anti-PDL1 mAb based on avelumab).

[0098] FIG. 49 depicts induction of A) IL-2 and B) IFNγ release by anti-PDL1 clone 2G4 (XENP25859), a partial blocking anti-PDL1 (XENP25853), a non-blocking anti-PDL1 (XENP25858), and XENP24118 (a benchmark anti-PDL1 mAb based on avelumab). The data show that the partial blocking and non-blocking anti-PDL1 clones induced less cytokine release in comparison to anti-PDL1 clone 2G4.

[0099] FIG. 50 depicts the dissociation constant (K_{D}) of αPDL1×αCD28 bsAbs (1+1 Fab-scFv-Fc format) having affinity-engineered PDL1 binding domains (as well as K_{D} fold improvement over αPDL1×αCD28 bsAb having WT 2G4 binding domain).

[0100] FIG. 51 depicts blockade of PD1:PDL1 interaction during T cell:cancer cell interaction (as modeled by Jurkat-PD1 cells incubated with CHO-PDL1-CD80-αCD3 and CHO-PDL1-αCD3 cells) by αPDL1×αCD28 bsAbs having anti-PDL1 clone 2G4 (XENP36233), a partial blocking anti-PDL1 (XENP36232), a non-blocking anti-PDL1 (XENP26783), and XENP34963 (a benchmark bsAb with an anti-PDL1 arm based on avelumab). The data show that bsAbs comprising partial blocking and non-blocking anti-PDL1 clones induced less activity in comparison to bsAb comprising anti-PDL1 clone 2G4.

[0101] FIG. 52 depicts binding of αPDL1×αCD28 (XENP36233) to parental PDL1^{null} MC38 or MC38 cells transfected to express PDL1 with low or medium high antigen densities.

[0102] FIG. 53 depicts induction of IL-2 release by αPDL1×αCD28 (XENP36233) in the presence of parental PDL1^{null} HEK293T cells or HEK293T transfected to express PDL1 with medium or high antigen densities.

[0103] FIG. 54 depicts induction of cell kill by αPSMA×αCD3 alone or in combination with αPDL1×αCD28 XENP36233 in the presence of CD3+ T cells and PDL1^{null} 22Rv1 cell line at A) 10:1 E:T ratio and B) 1:1 E:T ratio. The data show that αPDL1×αCD28 bsAbs do not synergize with CD3 bsAbs on PDL1 negative cell lines such as 22Rv1.

[0104] FIG. 55 depicts serum concentration of XENP36764 over time in cynomolgus monkeys. The αPDL1×αCD28 bsAb exhibited favorable pharmacokinetics.

[0105] FIG. 56 depicts diagram of assumptions used in a mechanism-based PK/PD computer model.

[0106] FIGS. 57A-57C depicts predictions from the mechanism-based modeling suggesting A) linear PK at dose levels consistent with typical checkpoint inhibitor regimens, B) trimer formation in the tumor indicating costimulation, and C) consistent blockade of PDL1.

[0107] FIG. 58 depicts induction of IL-2 release by αPDL1×αCD28 bsAbs having affinity-engineered CD28 binding domains in the presence of αB7H3×αCD3 bsAb, CD3+T cells, and A) MDA-MB-231 or B) DU145-NLR cells. The data show that increasing CD28 affinity leads to more potent and efficacious IL-2 secretion by αPDL1×αCD28 bsAbs.

[0108] FIG. 59 depicts induction of cell kill by αPDL1×αCD28 bsAbs having affinity-engineered CD28 binding domains in the presence of αB7H3×αCD3 bsAb, CD3+ T cells, and PDL1^{low} LnCAP cancer cells. The data show that increasing the affinity of CD28 increases targeting of PDL1^{low} cancer cells at low E:T of 1:1.

[0109] FIG. 60 depicts induction of cell kill by αPDL1×αCD28 bsAbs having affinity-engineered CD28 binding domains in the presence of αB7H3×αCD3 bsAb, CD3+ T cells, and PDL1^{med} DU145 cells. The data show that increasing the affinity of CD28 increases targeting of PDL1^{med} cancer cells at even lower E:T of 0.1:1.

[0110] FIGS. 61A-61D depict change in tumor volume (as determined by caliper measurements; baseline corrected) in individual mouse over time and D) on Day 28 in hPDL1-MC38-engrafted hCD28 knock-in mice dosed with A) PBS control, B) monovalent αPDL1 mAb XENP36627, and C) XENP37261 having enhanced CD28 binding affinity.

[0111] FIG. 62 depicts induction of IL-2 release by αPDL1×αCD28 bsAbs having affinity-engineered PDL1 binding domains in the presence of αB7H3×αCD3 bsAb, CD3+ T cells, and DU145-NLR cells. The data show that increasing PDL1 affinity promotes IL-2 secretion.

[0112] FIGS. 63A and 63B depict induction of A) IL2 and B) IFNγ release by αPDL1 mAb XENP24118 and αPDL1×αCD28 bsAb XENP38514 having enhanced PDL1 binding in a DC: T cell MLR. The data show that αPDL1×αCD28 enhanced T cell/APC interaction.

[0113] FIG. 64 depicts PD1:PDL1 blockade (binding of PDL1-mFc fusion to PD1-transfected HEK293T cells) by αPDL1×αCD28 bsAbs having affinity-engineered PDL1 binding domains. The data show the αPDL1×αCD28 bsAbs can block interaction between PD1 and PDL1.

[0114] FIG. 65 depicts induction of IL-2 release by αPDL1×αCD28 bsAbs having affinity-engineered CD28 binding domains and affinity-engineered PDL1 binding domains in the presence of SEB-stimulated PBMCs. The data show that increasing PDL1 affinity promotes IL-2 secretion.

[0115] FIG. 66 depicts induction of IL-2 release by αPDL1×αCD28 bsAbs having affinity-engineered CD28 binding domains and affinity-engineered PDL1 binding domains in the presence of CD3+ enriched T cells, MDA-MB0231 transfected to express αCD3 scFv (to act as Signal 1), and 1 μg/mL of an illustrative B7H3×CD3 bsAb. The data show that XENP40409 (non-Xtend analog of XENP40706) having 2G4_H1.12_L1.14 induced IL2 production most potently.

[0116] FIGS. 67A and 67B depict CD28 receptor occupancy on cynomolgus T cells (as indicated by decrease in binding by secondary CD28 mAb) after dosing with A) XENP36803 (1× dose, 4× dose, and 10× dose) or B) XENP36764 (4× dose, 10× dose, and 20× dose). The data show CD28 receptor occupancy up to day 14 on T cells.

[0117] FIGS. 68A and 68B depict PDL1 receptor occupancy on cynomolgus activated monocytes (decrease in free receptor as indicated by decrease in binding by one-arm PDL1 mAb based on 2G4) after dosing with A) XENP36803 (1× dose, 4× dose, and 10× dose) or B) XENP36764 (4× dose, 10× dose, and 20× dose).

[0118] FIGS. 69A and 69B depict proliferation of cynomolgus T cells (as indicated by increased Ki67 expression) after dosing with A) XENP36803 (1× dose, 4× dose, and 10× dose) or B) XENP36764 (4× dose, 10× dose, and 20× dose). Notably, the PDL1×CD28 bsAbs selectively induce proliferation of effector CD4+ and CD8+ T cells (i.e. CD45RA−).

[0119] FIG. 70 depicts consensus framework regions (FR) and complementarity determining regions (CDRs) (as in Kabat) for anti-CD28 clone 1A7 variable heavy and variable light domain variants. In some embodiments, the CD28 antigen binding domain provided herein includes one or more of the sequences depicted in FIG. 70.

[0120] FIG. 71 depicts consensus framework regions (FR) and complementarity determining regions (CDRs) (as in Kabat) for anti-PDL1 clone 2G4 variable heavy and variable light domain variants. In some embodiments, the PD-L1 antigen binding domain provided herein includes one or more of the sequences depicted in FIG. 71.

### DETAILED DESCRIPTION

### I. Overview

[0121] Provided herein are novel anti-PD-L1 antibodies, including novel anti-CD28×anti-PD-L1 (also referred to as “αCD28×αPD-L1”) bispecific antibodies, and methods of using such antibodies for the treatment of cancers. Subject αCD28×αPD-L1 antibodies are capable of agonistically binding to CD28 costimulatory molecules on T cells and targeting to PD-L1 on tumor cells. Thus, such antibodies selectively enhance anti-tumor activity at tumor sites while minimizing peripheral toxicity. The subject antibodies provided herein are particularly useful for enhancing anti-tumor activity when used in combination with other anti-cancer therapies.

[0122] Accordingly, in one aspect, provided herein are heterodimeric antibodies that bind to two different antigens, e.g., the antibodies are “bispecific,” in that they bind two different target antigens, generally CD28 and PD-L1 as described below. These heterodimeric antibodies can bind each of the target antigens either monovalently (e.g., there is a single antigen binding domain such as a variable heavy and variable light domain pair) or bivalently (there are two antigen binding domains that each independently bind the antigen). In some embodiments, the heterodimeric antibody provided herein includes one CD28 binding domain and one PD-L1 binding domain (e.g., heterodimeric antibodies in the “1+1 Fab-scFv-Fc” format described herein). In other embodiments, the heterodimeric antibody provided herein includes one CD28 binding domain and two PD-L1 binding domains (e.g., heterodimeric antibodies in the “2+1 Fab₂-scFv-Fc” formats described herein). The heterodimeric antibodies provided herein are based on the use of different monomers that contain amino acid substitutions (i.e., skew variants”) that “skew” formation of heterodimers over homodimers, as is more fully outlined below. In some embodiments, the heterodimer antibodies are also coupled with “pI variants” that allow simple purification of the heterodimers away from the homodimers, as is similarly outlined below. The heterodimeric bispecific antibodies provided generally rely on the use of engineered or variant Fc domains that can self-assemble in production cells to produce heterodimeric proteins, and methods to generate and purify such heterodimeric proteins.

### II. Nomenclature

[0123] The antibodies provided herein are listed in several different formats. In some instances, each monomer of a particular antibody is given a unique “XENP” number, although as will be appreciated in the art, a longer sequence might contain a shorter one. For example, a “scFv-Fc” monomer of a 1+1 Fab-scFv-Fc format antibody may have a first XENP number, while the scFv domain itself will have a different XENP number. Some molecules have three polypeptides, so the XENP number, with the components, is used as a name. Thus, the molecule XENP36154, which is in 2+1 Fab₂-scFv-Fc format, comprises three sequences (see FIG. 36) a “Fab-Fc Heavy Chain” monomer (“Chain 1”); 2) a “Fab-scFv-Fc Heavy Chain” monomer (“Chain 2”); and 3) a “Light Chain” monomer or equivalents, although one of skill in the art would be able to identify these easily through sequence alignment. These XENP numbers are in the sequence listing as well as identifiers, and used in the Figures. In addition, one molecule, comprising the three components, gives rise to multiple sequence identifiers. For example, the listing of the Fab includes the full heavy chain sequence, the variable heavy domain sequence and the three CDRs of the variable heavy domain sequence, the full light chain sequence, a variable light domain sequence and the three CDRs of the variable light domain sequence. A Fab-scFv-Fc monomer includes a full-length sequence, a variable heavy domain sequence, 3 heavy CDR sequences, and an scFv sequence (include scFv variable heavy domain sequence, scFv variable light domain sequence and scFv linker). Note that some molecules herein with a scFv domain use a single charged scFv linker (+H), although others can be used. In addition, the naming nomenclature of particular antigen binding domains (e.g., PD-L1 and CD28 binding domains) use a “Hx.xx_Ly.yy” or “Hx.xxLy.yy” type of format, with the numbers being unique identifiers to particular variable chain sequences. Thus, the variable domain of the Fab side of PD-L1 binding domain 2G4[PDL1](e.g., FIG. 28) is “H1L1”, which indicates that the variable heavy domain, H1, was combined with the light domain L1. In the case that these sequences are used as scFvs, the designation “H1_L1” or “H1L1”, indicates that the variable heavy domain, H1 is combined with the light domain, L1, and is in VH-linker-VL orientation, from N- to C-terminus. This molecule with the identical sequences of the heavy and light variable domains but in the reverse order (VL-linker-VH orientation, from N- to C-terminus) would be designated “L1_H”. Similarly, different constructs may “mix and match” the heavy and light chains as will be evident from the sequence listing and the figures.

### III. Definitions

[0124] In order that the application may be more completely understood, several definitions are set forth below. Such definitions are meant to encompass grammatical equivalents.

[0125] By “CD28,” “Cluster of Differentiation 28,” and “Tp44” (e.g., Genebank Accession Numbers NP_001230006 (human), NP_001230007 (human), NP_006130 (human), and NP_031668 (mouse)) herein is meant a B7 receptor expressed on T cells that provides co-stimulatory signals required for T cell activation and survival. T cell stimulation through CD28 in addition to the T cell receptor (TCR) provides a potent signal for the production of various interleukins. CD28 is the receptor for CD80 (B7.1) and CD86 (B7.2) proteins. CD28 includes an intercellular domain with a YMNM motif critical for the recruitment of SH2-domain containing proteins, particularly PI3K. CD28 also includes two proline-rich motifs that are able to bind SH3-containing proteins. Exemplary CD28 sequences are depicted in FIG. 1.

[0126] By “ablation” herein is meant a decrease or removal of activity. Thus, for example, “ablating FcγR binding” means the Fc region amino acid variant has less than 50% starting binding as compared to an Fc region not containing the specific variant, with more than 70-80-90-95-98% loss of activity being preferred, and in general, with the activity being below the level of detectable binding in a Biacore, SPR or BLI assay. Of particular use in the ablation of FcγR binding are those shown in FIG. 5, which generally are added to both monomers.

[0127] By “ADCC” or “antibody dependent cell-mediated cytotoxicity” as used herein is meant the cell-mediated reaction, wherein nonspecific cytotoxic cells that express FcγRs recognize bound antibody on a target cell and subsequently cause lysis of the target cell. ADCC is correlated with binding to FcγRIIIa; increased binding to FcγRIIIa leads to an increase in ADCC activity.

[0128] By “ADCP” or antibody dependent cell-mediated phagocytosis as used herein is meant the cell-mediated reaction wherein nonspecific phagocytic cells that express FcγRs recognize bound antibody on a target cell and subsequently cause phagocytosis of the target cell.

[0129] As used herein, the term “antibody” is used generally. Antibodies provided herein can take on a number of formats as described herein, including traditional antibodies as well as antibody derivatives, fragments and mimetics, described herein.

[0130] Traditional immunoglobulin (Ig) antibodies are “Y” shaped tetramers. Each tetramer is typically composed of two identical pairs of polypeptide chains, each pair having one “light chain” monomer (typically having a molecular weight of about 25 kDa) and one “heavy chain” monomer (typically having a molecular weight of about 50-70 kDa).

[0131] Other useful antibody formats include, but are not limited to, the “1+1 Fab-scFv-Fc,” “2+1 Fab₂-scFv-Fc,” “1+1 common light chain,” and “2+1 common light chain” formats provided herein (see, e.g., FIG. 26). Additional useful antibody formats include, but are not limited to, “mAb-Fv,” “mAb-scFv,” “central-Fv”, “one armed scFv-mAb,” “scFv-mAb,” “dual scFv,” and “trident” format antibodies, as disclosed in US20180127501A1, which is incorporated by reference herein, particularly in pertinent part relating to antibody formats (see, e.g., FIG. 2).

[0132] Antibody heavy chains typically include a variable heavy (VH) domain, which includes vhCDR1-3, and an Fc domain, which includes a CH2-CH3 monomer. In some embodiments, antibody heavy chains include a hinge and CH1 domain. Traditional antibody heavy chains are monomers that are organized, from N- to C-terminus: VH-CH1-hinge-CH2-CH3. The CH1-hinge-CH2-CH3 is collectively referred to as the heavy chain “constant domain” or “constant region” of the antibody, of which there are five different categories or “isotypes”: IgA, IgD, IgG, IgE and IgM.

[0133] In some embodiments, the antibodies provided herein include IgG isotype constant domains, which has several subclasses, including, but not limited to IgG1, IgG2, IgG3, and IgG4. In the IgG subclass of immunoglobulins, there are several immunoglobulin domains in the heavy chain. By “immunoglobulin (Ig) domain” herein is meant a region of an immunoglobulin having a distinct tertiary structure. Of interest in the present invention are the heavy chain domains, including, the constant heavy (CH) domains and the hinge domains. In the context of IgG antibodies, the IgG isotypes each have three CH regions. Accordingly, “CH” domains in the context of IgG are as follows: “CH1” refers to positions 118-215 according to the EU index as in Kabat. “Hinge” refers to positions 216-230 according to the EU index as in Kabat. “CH2” refers to positions 231-340 according to the EU index as in Kabat, and “CH3” refers to positions 341-447 according to the EU index as in Kabat. As shown in Table 1, the exact numbering and placement of the heavy chain domains can be different among different numbering systems. As shown herein and described below, the pI variants can be in one or more of the CH regions, as well as the hinge region, discussed below.

[0134] It should be noted that IgG1 has different allotypes with polymorphisms at 356 (D or E) and 358 (L or M). The sequences depicted herein use the 356E/358M allotype, however the other allotype is included herein. That is, any sequence inclusive of an IgG1 Fc domain included herein can have 356D/358L replacing the 356E/358M allotype. It should be understood that therapeutic antibodies can also comprise hybrids of isotypes and/or subclasses. For example, as shown in US Publication 2009/0163699, incorporated by reference, the present antibodies, in some embodiments, include human IgG1/G2 hybrids.

[0135] By “Fc” or “Fc region” or “Fc domain” as used herein is meant the polypeptide comprising the constant region of an antibody, in some instances, excluding all of the first constant region immunoglobulin domain (e.g., CH1) or a portion thereof, and in some cases, optionally including all or part of the hinge. For IgG, the Fc domain comprises immunoglobulin domains CH2 and CH3 (Cγ2 and Cγ3), and optionally all or a portion of the hinge region between CH1 (Cγ1) and CH2 (Cγ2). Thus, in some cases, the Fc domain includes, from N- to C-terminal, CH2-CH3 and hinge-CH2-CH3. In some embodiments, the Fc domain is that from IgG1, IgG2, IgG3 or IgG4, with IgG1 hinge-CH2-CH3 and IgG4 hinge-CH2-CH3 finding particular use in many embodiments. Additionally, in the case of human IgG1 Fc domains, the hinge may include a C220S amino acid substitution. Furthermore, in the case of human IgG4 Fc domains, the hinge may include a S228P amino acid substitution. Although the boundaries of the Fc region may vary, the human IgG heavy chain Fc region is usually defined to include residues E216, C226, or A231 to its carboxyl-terminal, wherein the numbering is according to the EU index as in Kabat. In some embodiments, as is more fully described below, amino acid modifications are made to the Fc region, for example to alter binding to one or more FcγR or to the FcRn.

[0136] By “heavy chain constant region” herein is meant the CH1-hinge-CH2-CH3 portion of an antibody (or fragments thereof), excluding the variable heavy domain; in EU numbering of human IgG1 this is amino acids 118-447. By “heavy chain constant region fragment” herein is meant a heavy chain constant region that contains fewer amino acids from either or both of the N- and C-termini but still retains the ability to form a dimer with another heavy chain constant region.

[0137] Another type of domain of the heavy chain is the hinge region. By “hinge” or “hinge region” or “antibody hinge region” or “hinge domain” herein is meant the flexible polypeptide comprising the amino acids between the first and second constant domains of an antibody. Structurally, the IgG CH1 domain ends at EU position 215, and the IgG CH2 domain begins at residue EU position 231. Thus for IgG the antibody hinge is herein defined to include positions 216 (E216 in IgG1) to 230 (P230 in IgG1), wherein the numbering is according to the EU index as in Kabat. In some cases, a “hinge fragment” is used, which contains fewer amino acids at either or both of the N- and C-termini of the hinge domain. As noted herein, pI variants can be made in the hinge region as well. Many of the antibodies herein have at least one the cysteines at position 220 according to EU numbering (hinge region) replaced by a serine. Generally, this modification is on the “scFv monomer” side for most of the sequences depicted herein, although it can also be on the “Fab monomer” side, or both, to reduce disulfide formation. Specifically included within the sequences herein are one or both of these cysteines replaced (C220S).

[0138] As will be appreciated by those in the art, the exact numbering and placement of the heavy chain constant region domains (i.e., CH1, hinge, CH2 and CH3 domains) can be different among different numbering systems. A useful comparison of heavy constant region numbering according to EU and Kabat is as below, see Edelman et al., 1969, Proc Natl Acad Sci USA 63:78-85 and Kabat et al., 1991, Sequences of Proteins of Immunological Interest, 5th Ed., United States Public Health Service, National Institutes of Health, Bethesda, entirely incorporated by reference.

TABLE 1

| | EU Numbering | Kabat Numbering |
|---|---|---|
| CH1 | 118-215 | 114-223 |
| Hinge | 216-230 | 226-243 |
| CH2 | 231-340 | 244-360 |
| CH3 | 341-447 | 361-478 |

[0139] The antibody light chain generally comprises two domains: the variable light domain (VL), which includes light chain CDRs vlCDR1-3, and a constant light chain region (often referred to as CL or Cκ). The antibody light chain is typically organized from N- to C-terminus: VL-CL.

[0140] By “antigen binding domain” or “ABD” herein is meant a set of six Complementary Determining Regions (CDRs) that, when present as part of a polypeptide sequence, specifically binds a target antigen (e.g., PD-L1 or CD28) as discussed herein. As is known in the art, these CDRs are generally present as a first set of variable heavy CDRs (vhCDRs or VHCDRs) and a second set of variable light CDRs (vlCDRs or VLCDRs), each comprising three CDRs: vhCDR1, vhCDR2, vhCDR3 variable heavy CDRs and vlCDR1, vlCDR2 and vlCDR3 vhCDR3 variable light CDRs. The CDRs are present in the variable heavy domain (vhCDR1-3) and variable light domain (vlCDR1-3). The variable heavy domain and variable light domain from an Fv region.

[0141] The present invention provides a large number of different CDR sets. In this case, a “full CDR set” comprises the three variable light and three variable heavy CDRs, e.g., a vlCDR1, vlCDR2, vlCDR3, vhCDR1, vhCDR2 and vhCDR3. These can be part of a larger variable light or variable heavy domain, respectfully. In addition, as more fully outlined herein, the variable heavy and variable light domains can be on separate polypeptide chains, when a heavy and light chain is used (for example when Fabs are used), or on a single polypeptide chain in the case of scFv sequences.

[0142] As will be appreciated by those in the art, the exact numbering and placement of the CDRs can be different among different numbering systems. However, it should be understood that the disclosure of a variable heavy and/or variable light sequence includes the disclosure of the associated (inherent) CDRs. Accordingly, the disclosure of each variable heavy region is a disclosure of the vhCDRs (e.g., vhCDR1, vhCDR2 and vhCDR3) and the disclosure of each variable light region is a disclosure of the vlCDRs (e.g., vlCDR1, vlCDR2 and vlCDR3). A useful comparison of CDR numbering is as below, see Lafranc et al., Dev. Comp. Immunol. 27(1):55-77 (2003):

TABLE 2

| | Kabat + | | | | | | |
|---|---|---|---|---|---|---|---|
| | Chothia | IMGT | Kabat | AbM | Chothia | Contact | Xencor |
| vhCDR1 | 26-35 | 27-38 | 31-35 | 26-35 | 26-32 | 30-35 | 27-35 |
| vhCDR2 | 50-65 | 56-65 | 50-65 | 50-58 | 52-56 | 47-58 | 54-61 |
| vhCDR3 | 95-102 | 105-117 | 95-102 | 95-102 | 95-102 | 93-101 | 103-116 |
| vlCDR1 | 24-34 | 27-38 | 24-34 | 24-34 | 24-34 | 30-36 | 27-38 |
| vlCDR2 | 50-56 | 56-65 | 50-56 | 50-56 | 50-56 | 46-55 | 56-62 |
| vlCDR3 | 89-97 | 105-117 | 89-97 | 89-97 | 89-97 | 89-96 | 97-105 |

[0143] Throughout the present specification, the Kabat numbering system is generally used when referring to a residue in the variable domain (approximately, residues 1-107 of the light chain variable region and residues 1-113 of the heavy chain variable region) and the EU numbering system for Fc regions (e.g., Kabat et al., supra (1991)).

[0144] The CDRs contribute to the formation of the antigen-binding, or more specifically, epitope binding site of the antigen binding domains and antibodies. “Epitope” refers to a determinant that interacts with a specific antigen binding site in the variable region of an antibody molecule known as a paratope. Epitopes are groupings of molecules such as amino acids or sugar side chains and usually have specific structural characteristics, as well as specific charge characteristics. A single antigen may have more than one epitope.

[0145] The epitope may comprise amino acid residues directly involved in the binding (also called immunodominant component of the epitope) and other amino acid residues, which are not directly involved in the binding, such as amino acid residues which are effectively blocked by the specifically antigen binding peptide; in other words, the amino acid residue is within the footprint of the specifically antigen binding peptide.

[0146] Epitopes may be either conformational or linear. A conformational epitope is produced by spatially juxtaposed amino acids from different segments of the linear polypeptide chain. A linear epitope is one produced by adjacent amino acid residues in a polypeptide chain. Conformational and nonconformational epitopes may be distinguished in that the binding to the former but not the latter is lost in the presence of denaturing solvents.

[0147] An epitope typically includes at least 3, and more usually, at least 5 or 8-10 amino acids in a unique spatial conformation. Antibodies that recognize the same epitope can be verified in a simple immunoassay showing the ability of one antibody to block the binding of another antibody to a target antigen, for example “binning.” As outlined below, the invention not only includes the enumerated antigen binding domains and antibodies herein, but those that compete for binding with the epitopes bound by the enumerated antigen binding domains.

[0148] In some embodiments, the six CDRs of the antigen binding domain are contributed by a variable heavy and a variable light domain. In a “Fab” format, the set of 6 CDRs are contributed by two different polypeptide sequences, the variable heavy domain (vh or VH; containing the vhCDR1, vhCDR2 and vhCDR3) and the variable light domain (vl or VL; containing the vlCDR1, vlCDR2 and vlCDR3), with the C-terminus of the vh domain being attached to the N-terminus of the CH1 domain of the heavy chain and the C-terminus of the vl domain being attached to the N-terminus of the constant light domain (and thus forming the light chain). In a scFv format, the vh and vl domains are covalently attached, generally through the use of a linker (a “scFv linker”) as outlined herein, into a single polypeptide sequence, which can be either (starting from the N-terminus) vh-linker-vl or vl-linker-vh, with the former being generally preferred (including optional domain linkers on each side, depending on the format used (e.g., from FIG. 26). In general, the C-terminus of the scFv domain is attached to the N-terminus of the hinge in the second monomer.

[0149] By “variable region” or “variable domain” as used herein is meant the region of an immunoglobulin that comprises one or more Ig domains substantially encoded by any of the Vκ, Vλ, and/or VH genes that make up the kappa, lambda, and heavy chain immunoglobulin genetic loci respectively, and contains the CDRs that confer antigen specificity. Thus, a “variable heavy domain” pairs with a “variable light domain” to form an antigen binding domain (“ABD”). In addition, each variable domain comprises three hypervariable regions (“complementary determining regions,” “CDRs”) (vhCDR1, vhCDR2 and vhCDR3 for the variable heavy domain and vlCDR1, v1CDR2 and vlCDR3 for the variable light domain) and four framework (FR) regions, arranged from amino-terminus to carboxy-terminus in the following order: FR1-CDR1-FR2-CDR2-FR3-CDR3-FR4.

[0150] By “Fab” or “Fab region” as used herein is meant the antibody region that comprises the VH, CH1, VL, and CL immunoglobulin domains, generally on two different polypeptide chains (e.g., VH-CH1 on one chain and VL-CL on the other). Fab may refer to this region in isolation, or this region in the context of a bispecific antibody of the invention. In the context of a Fab, the Fab comprises an Fv region in addition to the CH1 and CL domains.

[0151] By “Fv” or “Fv fragment” or “Fv region” as used herein is meant the antibody region that comprises the VL and VH domains. Fv regions can be formatted as both Fabs (as discussed above, generally two different polypeptides that also include the constant regions as outlined above) and single chain Fvs (scFvs), where the vl and vh domains are included in a single peptide, attached generally with a linker as discussed herein.

[0152] By “single chain Fv” or “scFv” herein is meant a variable heavy domain covalently attached to a variable light domain, generally using a scFv linker as discussed herein, to form a scFv or scFv domain. A scFv domain can be in either orientation from N- to C-terminus (vh-linker-vl or vl-linker-vh). In the sequences depicted in the sequence listing and in the figures, the order of the vh and vl domain is indicated in the name, e.g., H.X_L.Y means N- to C-terminal is vh-linker-vl, and L.Y_H.X is vl-linker-vh.

[0153] Some embodiments of the subject antibodies provided herein comprise at least one scFv domain, which, while not naturally occurring, generally includes a variable heavy domain and a variable light domain, linked together by a scFv linker. As outlined herein, while the scFv domain is generally from N- to C-terminus oriented as VH-scFv linker-VL, this can be reversed for any of the scFv domains (or those constructed using vh and vl sequences from Fabs), to VL-scFv linker-VH, with optional linkers at one or both ends depending on the format.

[0154] By “modification” or “variant” herein is meant an amino acid substitution, insertion, and/or deletion in a polypeptide sequence or an alteration to a moiety chemically linked to a protein. For example, a modification may be an altered carbohydrate or PEG structure attached to a protein. By “amino acid modification” herein is meant an amino acid substitution, insertion, and/or deletion in a polypeptide sequence. For clarity, unless otherwise noted, the amino acid modification is always to an amino acid coded for by DNA, e.g., the 20 amino acids that have codons in DNA and RNA.

[0155] By “amino acid substitution” or “substitution” herein is meant the replacement of an amino acid at a particular position in a parent polypeptide sequence with a different amino acid. In particular, in some embodiments, the substitution is to an amino acid that is not naturally occurring at the particular position, either not naturally occurring within the organism or in any organism. For example, the substitution E272Y refers to a variant polypeptide, in this case an Fc variant, in which the glutamic acid at position 272 is replaced with tyrosine. For clarity, a protein which has been engineered to change the nucleic acid coding sequence but not change the starting amino acid (for example exchanging CGG (encoding arginine) to CGA (still encoding arginine) to increase host organism expression levels) is not an “amino acid substitution;” that is, despite the creation of a new gene encoding the same protein, if the protein has the same amino acid at the particular position that it started with, it is not an amino acid substitution.

[0156] By “amino acid insertion” or “insertion” as used herein is meant the addition of an amino acid sequence at a particular position in a parent polypeptide sequence. For example, −233E or 233E designates an insertion of glutamic acid after position 233 and before position 234. Additionally, −233ADE or A233ADE designates an insertion of AlaAspGlu after position 233 and before position 234.

[0157] By “amino acid deletion” or “deletion” as used herein is meant the removal of an amino acid sequence at a particular position in a parent polypeptide sequence. For example, E233- or E233#, E233( ) or E233del designates a deletion of glutamic acid at position 233. Additionally, EDA233- or EDA233# designates a deletion of the sequence GluAspAla that begins at position 233.

[0158] By “variant protein” or “protein variant”, or “variant” as used herein is meant a protein that differs from that of a parent protein by virtue of at least one amino acid modification. The protein variant has at least one amino acid modification compared to the parent protein, yet not so many that the variant protein will not align with the parental protein using an alignment program such as that described below. In general, variant proteins (such as variant Fc domains, etc., outlined herein, are generally at least 75, 80, 85, 90, 91, 92, 93, 94, 95, 96, 97, 98 or 99% identical to the parent protein, using the alignment programs described below, such as BLAST.

[0159] “Variant” as used herein also refers to particular amino acid modifications that confer particular function (e.g., a “heterodimerization variant,” “pI variant,” “ablation variant,” etc.).

[0160] As described below, in some embodiments the parent polypeptide, for example an Fc parent polypeptide, is a human wild type sequence, such as the heavy constant domain or Fc region from IgG1, IgG2, IgG3 or IgG4, although human sequences with variants can also serve as “parent polypeptides”, for example the IgG1/2 hybrid of US Publication 2006/0134105 can be included. The protein variant sequence herein will preferably possess at least about 80% identity with a parent protein sequence, and most preferably at least about 90% identity, more preferably at least about 95-98-99% identity. Accordingly, by “antibody variant” or “variant antibody” as used herein is meant an antibody that differs from a parent antibody by virtue of at least one amino acid modification, “IgG variant” or “variant IgG” as used herein is meant an antibody that differs from a parent IgG (again, in many cases, from a human IgG sequence) by virtue of at least one amino acid modification, and “immunoglobulin variant” or “variant immunoglobulin” as used herein is meant an immunoglobulin sequence that differs from that of a parent immunoglobulin sequence by virtue of at least one amino acid modification. “Fc variant” or “variant Fc” as used herein is meant a protein comprising an amino acid modification in an Fc domain as compared to an Fc domain of human IgG1, IgG2 or IgG4.

[0161] “Fc variant” or “variant Fc” as used herein is meant a protein comprising an amino acid modification in an Fc domain. The modification can be an addition, deletion, or substitution. The Fc variants are defined according to the amino acid modifications that compose them. Thus, for example, N434S or 434S is an Fc variant with the substitution for serine at position 434 relative to the parent Fc polypeptide, wherein the numbering is according to the EU index. Likewise, M428L/N434S defines an Fc variant with the substitutions M428L and N434S relative to the parent Fc polypeptide. The identity of the WT amino acid may be unspecified, in which case the aforementioned variant is referred to as 428L/434S. It is noted that the order in which substitutions are provided is arbitrary, that is to say that, for example, 428L/434S is the same Fc variant as 434S/428L, and so on. For all positions discussed herein that relate to antibodies or derivatives and fragments thereof (e.g., Fe domains), unless otherwise noted, amino acid position numbering is according to the EU index. The “EU index” or “EU index as in Kabat” or “EU numbering” scheme refers to the numbering of the EU antibody (Edelman et al., 1969, Proc Natl Acad Sci USA 63:78-85, hereby entirely incorporated by reference). The modification can be an addition, deletion, or substitution.

[0162] In general, variant Fc domains have at least about 80, 85, 90, 95, 97, 98 or 99 percent identity to the corresponding parental human IgG Fc domain (using the identity algorithms discussed below, with one embodiment utilizing the BLAST algorithm as is known in the art, using default parameters). Alternatively, the variant Fc domains can have from 1, 2, 3, 4, 5, 6, 7, 8, 9, 10, 11, 12, 13, 14, 15, 16, 11, 12, 13, 14, 15, 16, 17, 18, 19 or 20 amino acid modifications as compared to the parental Fc domain. Alternatively, the variant Fc domains can have up to 1, 2, 3, 4, 5, 6, 7, 8, 9, 10, 11, 12, 13, 14, 15, 16, 11, 12, 13, 14, 15, 16, 17, 18, 19 or 20 amino acid modifications as compared to the parental Fc domain. Additionally, as discussed herein, the variant Fc domains described herein still retain the ability to form a dimer with another Fc domain as measured using known techniques as described herein, such as non-denaturing gel electrophoresis.

[0163] By “protein” as used herein is meant at least two covalently attached amino acids, which includes proteins, polypeptides, oligopeptides and peptides. In addition, polypeptides that make up the antibodies of the invention may include synthetic derivatization of one or more side chains or termini, glycosylation, PEGylation, circular permutation, cyclization, linkers to other molecules, fusion to proteins or protein domains, and addition of peptide tags or labels.

[0164] By “residue” as used herein is meant a position in a protein and its associated amino acid identity. For example, Asparagine 297 (also referred to as Asn297 or N297) is a residue at position 297 in the human antibody IgG1.

[0165] By “IgG subclass modification” or “isotype modification” as used herein is meant an amino acid modification that converts one amino acid of one IgG isotype to the corresponding amino acid in a different, aligned IgG isotype. For example, because IgG1 comprises a tyrosine and IgG2 a phenylalanine at EU position 296, a F296Y substitution in IgG2 is considered an IgG subclass modification.

[0166] By “non-naturally occurring modification” as used herein is meant an amino acid modification that is not isotypic. For example, because none of the human IgGs comprise a serine at position 434, the substitution 434S in IgG1, IgG2, IgG3, or IgG4 (or hybrids thereof) is considered a non-naturally occurring modification.

[0167] By “amino acid” and “amino acid identity” as used herein is meant one of the 20 naturally occurring amino acids that are coded for by DNA and RNA.

[0168] By “effector function” as used herein is meant a biochemical event that results from the interaction of an antibody Fc region with an Fc receptor or ligand. Effector functions include but are not limited to ADCC, ADCP, and CDC.

[0169] By “IgG Fc ligand” as used herein is meant a molecule, preferably a polypeptide, from any organism that binds to the Fc region of an IgG antibody to form an Fc/Fc ligand complex. Fc ligands include but are not limited to FcγRIs, FcγRIIs, FcγRIIIs, FcRn, C1q, C3, mannan binding lectin, mannose receptor, staphylococcal protein A, streptococcal protein G, and viral FcγR. Fc ligands also include Fc receptor homologs (FcRH), which are a family of Fc receptors that are homologous to the FcγRs (Davis et al., 2002, Immunological Reviews 190:123-136, entirely incorporated by reference). Fc ligands may include undiscovered molecules that bind Fc. Particular IgG Fc ligands are FcRn and Fc gamma receptors. By “Fc ligand” as used herein is meant a molecule, preferably a polypeptide, from any organism that binds to the Fc region of an antibody to form an Fc/Fc ligand complex.

[0170] By “Fc gamma receptor”, “FcγR” or “FcgammaR” as used herein is meant any member of the family of proteins that bind the IgG antibody Fc region and is encoded by an FcγR gene. In humans this family includes but is not limited to FcγRI (CD64), including isoforms FcγRIa, FcγRIb, and FcγRIc; FcγRII (CD32), including isoforms FcγRIIa (including allotypes H131 and R131), FcγRIIb (including FcγRIIb-1 and FcγRIIb-2), and FcγRIIc; and FcγRIII (CD16), including isoforms FcγRIIIa (including allotypes V158 and F158) and FcγRIIIb (including allotypes FcγRIIb-NA1 and FcγRIIb-NA2) (Jefferis et al., 2002, Immunol Lett 82:57-65, entirely incorporated by reference), as well as any undiscovered human FcγRs or FcγR isoforms or allotypes. An FcγR may be from any organism, including but not limited to humans, mice, rats, rabbits, and monkeys. Mouse FcγRs include but are not limited to FcγRI (CD64), FcγRII (CD32), FcγRIII (CD16), and FcγRIII-2 (CD16-2), as well as any undiscovered mouse FcγRs or FcγR isoforms or allotypes.

[0171] By “FcRn” or “neonatal Fc Receptor” as used herein is meant a protein that binds the IgG antibody Fc region and is encoded at least in part by an FcRn gene. The FcRn may be from any organism, including but not limited to humans, mice, rats, rabbits, and monkeys. As is known in the art, the functional FcRn protein comprises two polypeptides, often referred to as the heavy chain and light chain. The light chain is beta-2-microglobulin and the heavy chain is encoded by the FcRn gene. Unless otherwise noted herein, FcRn or an FcRn protein refers to the complex of FcRn heavy chain with beta-2-microglobulin. A variety of FcRn variants used to increase binding to the FcRn receptor, and in some cases, to increase serum half-life. An “FcRn variant” is an amino acid modification that contributes to increased binding to the FcRn receptor, and suitable FcRn variants are shown below.

[0172] By “parent polypeptide” as used herein is meant a starting polypeptide that is subsequently modified to generate a variant. The parent polypeptide may be a naturally occurring polypeptide, or a variant or engineered version of a naturally occurring polypeptide. Accordingly, by “parent immunoglobulin” as used herein is meant an unmodified immunoglobulin polypeptide that is modified to generate a variant, and by “parent antibody” as used herein is meant an unmodified antibody that is modified to generate a variant antibody. It should be noted that “parent antibody” includes known commercial, recombinantly produced antibodies as outlined below. In this context, a “parent Fc domain” will be relative to the recited variant; thus, a “variant human IgG1 Fc domain” is compared to the parent Fc domain of human IgG1, a “variant human IgG4 Fc domain” is compared to the parent Fc domain human IgG4, etc.

[0173] By “position” as used herein is meant a location in the sequence of a protein. Positions may be numbered sequentially, or according to an established format, for example the EU index for numbering of antibody domains (e.g., a CH1, CH2, CH3 or hinge domain).

[0174] By “target antigen” as used herein is meant the molecule that is bound specifically by the antigen binding domain comprising the variable regions of a given antibody.

[0175] By “strandedness” in the context of the monomers of the heterodimeric antibodies of the invention herein is meant that, similar to the two strands of DNA that “match”, heterodimerization variants are incorporated into each monomer so as to preserve the ability to “match” to form heterodimers. For example, if some pI variants are engineered into monomer A (e.g., making the pI higher) then steric variants that are “charge pairs” that can be utilized as well do not interfere with the pI variants, e.g., the charge variants that make a pI higher are put on the same “strand” or “monomer” to preserve both functionalities. Similarly, for “skew” variants that come in pairs of a set as more fully outlined below, the skilled artisan will consider pI in deciding into which strand or monomer one set of the pair will go, such that pI separation is maximized using the pI of the skews as well.

[0176] By “target cell” as used herein is meant a cell that expresses a target antigen.

[0177] By “host cell” in the context of producing a bispecific antibody according to the invention herein is meant a cell that contains the exogeneous nucleic acids encoding the components of the bispecific antibody and is capable of expressing the bispecific antibody under suitable conditions. Suitable host cells are discussed below.

[0178] By “wild type” or “WT” herein is meant an amino acid sequence or a nucleotide sequence that is found in nature, including allelic variations. A WT protein has an amino acid sequence or a nucleotide sequence that has not been intentionally modified.

[0179] Provided herein are a number of antibody domains (e.g., Fc domains) that have sequence identity to human antibody domains. Sequence identity between two similar sequences (e.g., antibody variable domains) can be measured by algorithms such as that of Smith, T. F. & Waterman, M. S. (1981) “Comparison Of Biosequences,” Adv. Appl. Math. 2:482 [local homology algorithm]; Needleman, S. B. & Wunsch, C D. (1970) “A General Method Applicable To The Search For Similarities In The Amino Acid Sequence Of Two Proteins,” J. Mol. Biol. 48:443 [homology alignment algorithm], Pearson, W. R. & Lipman, D. J. (1988) “Improved Tools For Biological Sequence Comparison,” Proc. Natl. Acad. Sci. (U.S.A.) 85:2444 [search for similarity method]; or Altschul, S. F. et al, (1990) “Basic Local Alignment Search Tool,” J. Mol. Biol. 215:403-10, the “BLAST” algorithm, see https://blast.ncbi.nlm.nih.gov/Blast.cgi. When using any of the aforementioned algorithms, the default parameters (for Window length, gap penalty, etc.) are used. In one embodiment, sequence identity is done using the BLAST algorithm, using default parameters

[0180] The antibodies of the present invention are generally isolated or recombinant. “Isolated,” when used to describe the various polypeptides disclosed herein, means a polypeptide that has been identified and separated and/or recovered from a cell or cell culture from which it was expressed. Ordinarily, an isolated polypeptide will be prepared by at least one purification step. An “isolated antibody,” refers to an antibody which is substantially free of other antibodies having different antigenic specificities. “Recombinant” means the antibodies are generated using recombinant nucleic acid techniques in exogeneous host cells, and they can be isolated as well.

[0181] “Specific binding” or “specifically binds to” or is “specific for” a particular antigen or an epitope means binding that is measurably different from a non-specific interaction. Specific binding can be measured, for example, by determining binding of a molecule compared to binding of a control molecule, which generally is a molecule of similar structure that does not have binding activity. For example, specific binding can be determined by competition with a control molecule that is similar to the target.

[0182] Specific binding for a particular antigen or an epitope can be exhibited, for example, by an antibody having a KD for an antigen or epitope of at least about 10⁻⁴ M, at least about 10⁻⁵ M, at least about 10⁻⁶ M, at least about 10⁻⁷ M, at least about 10⁻⁸ M, at least about 10⁻⁹ M, alternatively at least about 10⁻¹⁰ M, at least about 10⁻¹¹ M, at least about 10⁻¹² M, or greater, where KD refers to a dissociation rate of a particular antibody-antigen interaction. Typically, an antibody that specifically binds an antigen will have a KD that is 20-, 50-, 100-, 500-, 1000-, 5,000-, 10,000- or more times greater for a control molecule relative to the antigen or epitope.

[0183] Also, specific binding for a particular antigen or an epitope can be exhibited, for example, by an antibody having a KA or Ka for an antigen or epitope of at least 20-, 50-, 100-, 500-, 1000-, 5,000-, 10,000- or more times greater for the epitope relative to a control, where KA or Ka refers to an association rate of a particular antibody-antigen interaction. Binding affinity is generally measured using a Biacore, SPR or BLI assay.

### IV. PD-L1 and CD28 Antigen Binding Domains

[0184] Provided herein are antigen binding domains (ABDs) and ABD compositions that bind either PD-L1 or CD28. In some embodiments, one or more of the ABDs are included in an antibody format described herein including, for example, “1+1 Fab-scFv-Fc,” “2+1 Fab₂-scFv-Fc,” “2+1 mAb-scFv,” “1+1 common light chain,” and “2+1 common light chain” antibodies.

### A. PD-L1 Antigen Binding Domains

[0185] In one aspect, provided herein are PD-L1 antigen binding domains (ABDs) and compositions that include such PD-L1 antigen binding domains (ABDs), including anti-PD-L1 antibodies. Such PD-L1 binding domains and related antibodies (e.g., anti-PD-L1×anti-CD28 bispecific antibodies) find use, for example, in the treatment of PD-L1 associated cancers. In some embodiments, the PD-L1 ABDs are capable of binding to human and cynomolgus PD-L1 (see FIG. 2 and Example 2).

[0186] As will be appreciated by those in the art, suitable PD-L1 binding domains can comprise a set of 6 CDRs as depicted in FIGS. 28-31 and the Sequence Listing. Suitable PD-L1 ABDs can also include the entire VH and VL sequences as depicted in these sequences and FIGS. 28-31 and the Sequence Listing, used as scFvs or as Fab domains.

[0187] In one embodiment, the PD-L1 antigen binding domain includes the 6 CDRs (i.e., vhCDR1-3 and vlCDR1-3) of a PD-L1 ABD described herein, including FIGS. 28-31 and the Sequence Listing, either as the CDRs are underlined or, in the case where a different numbering scheme is used as described herein and as shown in Table 2, as the CDRs that are identified using other alignments within the variable heavy (VH) domain and variable light domain (VL) sequences of those depicted in FIGS. 28-31 and the Sequence Listing (see Table 2). Suitable PD-L1 ABDs can also include the entire VH and VL sequences as depicted in these sequences and figures, used as scFvs or as Fab domains. Additional anti-PD-L1 ABDs are shown in FIGS. 15, 73 and 78 of U.S. Pat. No. 10,793,632, as well as SEQ ID Nos:3961 to 4432 of that application, all of which sequences are incorporated herein by reference.

[0188] In one embodiment, the PD-L1 antigen binding domain includes the 6 CDRs (i.e., vhCDR1-3 and vlCDR1-3) of an PD-L1 ABD described herein, including FIGS. 28-31 and the Sequence Listing. In exemplary embodiments, the PD-L1 ABD is one of the following PD-L1 ABDs: 2G4[PDL1]_H1L1, 2G4[PDL1]_H1.12_L1.24, 2G4[PDL1]_H1.12_L1.66, 2G4[PDL1]_H1.12_L1.68, 2G4[PDL1]_H1.12_L1.14, 2G4[PDL1]_H1.4_L1.23, 2G4[PDL1]_H1.4_L1.24, 2G4[PDL1]_H1.9_L1, 2G4[PDL1]_H1.62_L1.63, 2G4[PDL1]_H1.6_L1.3, 2G4[PDL1]_H1.61_L0.61, 2G4[PDL1]_H1.60_L1.60, 2G4[PDL1]_H1.59_L1.60, 2G4[PDL1]_H1.14_L1.26, 2G4[PDL1]_H1_L1.27, 2G4[PDL1]_H1.8_L1.26, 2G4[PDL1]_H1_L1.25, 2G4[PDL1]_H1.10_L1.23, 2G4[PDL1]_H1.1_L1.1, 2G4[PDL1]_H1_L1.29, 2.14H9 OPT, atezolizumab, avelumab, 12A4, 3G10, 10A5, h3D10 Var1, h3D10 Var2, h3D10 Var3, h3D10 Var4, h3D10 Var5, h3D10 Var6, h3D10 Var7, h3D10 Var8, h3D10 Var9, h3D10 Var10, h3D10 Var11, h3D10 Var12, h3D10 Var13, h3D10 Var14, Antibody A, C5H9v2, Humanized 29E.2A3, 1B9, 4H1, mAb-42, BAP058-03, BAP058-04, BAP058-06, BAP058-07, BAP058-11, BAP058-13, H6, RC5, SH1A1Q, SH1B3, SHID1, SH1D2, SH1D12, SH1E1, SH1G9, SH1E6, SH1A2, SH1B1, H6B1L, H6A1, H6B1, H6B2, G12, RSA1, RA3, SH1E2, SH1E4, SH1B11, SH1C8, H1H9364P2, H1H9373P2, H1H8314N, and PDL1.3.1 (FIGS. 28-31 and the Sequence Listing).

[0189] In addition to the parental CDR sets disclosed in the figures and sequence listing that form an ABD to PD-L1, provided herein are variant PD-L1 ABDS having CDRs that include at least one modification of the PD-L1 ABD CDRs disclosed herein. In one embodiment, the PD-L1 ABD includes a set of 6 CDRs with 1, 2, 3, 4, 5, 6, 7, 8, 9, 10 amino acid modifications as compared to the 6 CDRs of an PD-L1 ABD described herein, including the figures and sequence listing. In exemplary embodiments, the PD-L1 ABD includes a set of 6 CDRs with 1, 2, 3, 4, 5, 6, 7, 8, 9, 10 amino acid modifications as compared to the 6 CDRs of one of the following 2G4 ABDs: 2G4[PDL1]_H1L1, 2G4[PDL1]_H1.12_L1.24, 2G4[PDL1]_H1.12_L1.66, 2G4[PDL1]_H1.12_L1.68, 2G4[PDL1]_H1.12_L1.14, 2G4[PDL1]_H1.4_L1.23, 2G4[PDL1]_H1.4_L1.24, 2G4[PDL1]_H1.9_L1, 2G4[PDL1]_H1.62_L1.63, 2G4[PDL1]_H1.6_L1.3, 2G4[PDL1]_H1.61_L1.61, 2G4[PDL1]_H1.60_L1.60, 2G4[PDL1]_H1.59_L1.60, 2G4[PDL1]_H1.14_L1.26, 2G4[PDL1]_H1_L1.27, 2G4[PDL1]_H1.8_L1.26, 2G4[PDL1]_H1_L1.25, 2G4[PDL1]_H1.10_L1.23, 2G4[PDL1]_H1.1_L1.1, 2G4[PDL1]_H1_L1.29, 2.14H9 OPT, atezolizumab, avelumab, 12A4, 3G10, 10A5, h3D10 Var1, h3D10 Var2, h3D10 Var3, h3D10 Var4, h3D10 Var5, h3D10 Var6, h3D10 Var7, h3D10 Var8, h3D10 Var9, h3D10 Var10, h3D10 Var1, h3D10 Var12, h3D10 Var13, h3D10 Var14, Antibody A, C5H9v2, Humanized 29E.2A3, 1B9, 4H1, mAb-42, BAP058-03, BAP058-04, BAP058-06, BAP058-07, BAP058-11, BAP058-13, H6, RC5, SH1A1Q, SH1B3, SHID1, SH1D2, SH1D12, SH1E1, SH1G9, SH1E6, SH1A2, SH1B1, H6B1L, H6A1, H6B1, H6B2, G12, RSA1, RA3, SH1E2, SH1E4, SH1B11, SH1C8, H1H9364P2, H1H9373P2, H1H8314N, and PDL1.3.1 (FIGS. 28-31 and the Sequence Listing). In certain embodiments, the variant PD-L1 ABD is capable of binding PD-L1 antigen, as measured by at least one of a Biacore, surface plasmon resonance (SPR) and/or BLI (biolayer interferometry, e.g., Octet assay) assay, with the latter finding particular use in many embodiments. In particular embodiments, the PD-L1 ABD is capable of binding to human and cynomolgus PD-L1.

[0190] In one embodiment, the anti-PD-L1 ABD includes 6 CDRs that are at least 90, 95, 97, 98 or 99% identical to the 6 CDRs of an anti-PD-L1 ABD as described herein, including FIGS. 28-31 and the Sequence Listing. In exemplary embodiments, the anti-PD-L1 ABD includes 6 CDRs that are at least 90, 95, 97, 98 or 99% identical to the 6 CDRs of one of the following PD-L1 ABDs: 2G4[PDL1]_H1L1, 2G4[PDL1]_H1.12_L1.24, 2G4[PDL1]_H1.12_L1.66, 2G4[PDL1]_H1.12_L1.68, 2G4[PDL1]_H1.12_L1.14, 2G4[PDL1]_H1.4_L1.23, 2G4[PDL1]_H1.4_L1.24, 2G4[PDL1]_H1.9_L1, 2G4[PDL1]_H1.62_L1.63, 2G4[PDL1]_H1.6_L1.3, 2G4[PDL1]_H1.61_L1.61, 2G4[PDL1]_H1.60_L1.60, 2G4[PDL1]_H1.59_L1.60, 2G4[PDL1]_H1.14_L1.26, 2G4[PDL1]_H1_L1.27, 2G4[PDL1]_H1.8_L1.26, 2G4[PDL1]_H1_L1.25, 2G4[PDL1]_H1.10_L1.23, 2G4[PDL1]_H1.1_L1.1, 2G4[PDL1]_H1_L1.29, 2.14H9 OPT, atezolizumab, avelumab, 12A4, 3G10, 10A5, h3D10 Var1, h3D10 Var2, h3D10 Var3, h3D10 Var4, h3D10 Var5, h3D10 Var6, h3D10 Var7, h3D10 Var8, h3D10 Var9, h3D10 Var10, h3D10 Var1, h3D10 Var12, h3D10 Var13, h3D10 Var14, Antibody A, C5H9v2, Humanized 29E.2A3, 1B9, 4H1, mAb-42, BAP058-03, BAP058-04, BAP058-06, BAP058-07, BAP058-11, BAP058-13, H6, RC5, SH1A1Q, SH1B3, SHID1, SH1D2, SH1D12, SH1E1, SH1G9, SH1E6, SH1A2, SH1B1, H6B1L, H6A1, H6B1, H6B2, G12, RSA1, RA3, SH1E2, SH1E4, SH1B11, SH1C8, H1H9364P2, H1H9373P2, H1H8314N, and PDL1.3.1 (FIGS. 28-31 and the Sequence Listing). In certain embodiments, the anti-PD-L1 ABD is capable of binding to PD-L1 antigen, as measured by at least one of a Biacore, surface plasmon resonance (SPR) and/or BLI (biolayer interferometry, e.g., Octet assay) assay, with the latter finding particular use in many embodiments. In particular embodiments, the PD-L1 ABD is capable of binding to human and cynomolgus PD-L1.

[0191] In another exemplary embodiment, the anti-PD-L1 ABD include the variable heavy (VH) domain and/or variable light (VL) domain of any one of the PD-L1 ABDs described herein, including FIGS. 28-31 and the Sequence Listing. In exemplary embodiments, the anti-PD-L1 ABD is 2G4[PDL1]_H1L1, 2G4[PDL1]_H1.12_L1.24, 2G4[PDL1]_H1.12_L1.66, 2G4[PDL1]_H1.12_L1.68, 2G4[PDL1]_H1.12_L1.14, 2G4[PDL1]_H1.4_L1.23, 2G4[PDL1]_H1.4_L1.24, 2G4[PDL1]_H1.9_L1, 2G4[PDL1]_H1.62_L1.63, 2G4[PDL1]_H1.6_L1.3, 2G4[PDL1]_H1.61_L0.61, 2G4[PDL1]_H1.60_L1.60, 2G4[PDL1]_H1.59_L1.60, 2G4[PDL1]_H1.14_L1.26, 2G4[PDL1]_H1_L1.27, 2G4[PDL1]_H1.8_L1.26, 2G4[PDL1]_H1_L1.25, 2G4[PDL1]_H1.10_L1.23, 2G4[PDL1]_H1.1_L1.1, 2G4[PDL1]_H1_L1.29, 2.14H9 OPT, atezolizumab, avelumab, 12A4, 3G10, 10A5, h3D10 Var1, h3D10 Var2, h3D10 Var3, h3D10 Var4, h3D10 Var5, h3D10 Var6, h3D10 Var7, h3D10 Var8, h3D10 Var9, h3D10 Var10, h3D10 Var11, h3D10 Var12, h3D10 Var13, h3D10 Var14, Antibody A, C5H9v2, Humanized 29E.2A3, 1B9, 4H1, mAb-42, BAP058-03, BAP058-04, BAP058-06, BAP058-07, BAP058-11, BAP058-13, H6, RC5, SH1A1Q, SH1B3, SH1D1, SH1D2, SH1D12, SH1E1, SH1G9, SH1E6, SH1A2, SH1B1, H6B1L, H6A1, H6B1, H6B2, G12, RSA1, RA3, SH1E2, SH1E4, SH1B11, SH1C8, H1H9364P2, H1H9373P2, H1H8314N, and PDL1.3.1 (FIGS. 28-31 and the Sequence Listing).

[0192] In some embodiments, the PD-L1 ABD includes one of the following PD-L1 ABD variable heavy domains: SEQ ID NO: 1079, SEQ ID NO:1042, SEQ ID NO:1055, SEQ ID NO:1059, SEQ ID NO:1063, SEQ ID NO: 1067, SEQ ID NO: 1071, SEQ ID NO: 1075, SEQ ID NO:1083, SEQ ID NO:1087, SEQ ID NO:1091, SEQ ID NO:1095, and SEQ ID NO:1099, SEQ ID NOs:736-797.

[0193] In some embodiments, the PD-L1 ABD includes one of the following PD-L1 ABD variable light domains: SEQ ID NO:1111, SEQ ID NO:1046, SEQ ID NO: 1103, SEQ ID NO:1107, SEQ ID NO:1115, SEQ ID NO:1119, SEQ ID NO:1123, SEQ ID NO:1127, SEQ ID NO:1131, SEQ ID NO:1135, SEQ ID NO:1139, SEQ ID NO:1143, SEQ ID NO:1147, SEQ ID NO:1151, SEQ ID NO:1155, and SEQ ID NOs:798-868.

[0194] Any of the PD-L1 ABD variable heavy domain or variants thereof disclosed herein can be combined with any of the variable light domains or variants thereof described herein to form PD-L1 ABDs for use in any of the antibody formats provided herein.

[0195] In addition to the parental anti-PD-L1 binding domain variable heavy and variable light domains disclosed herein, provided herein are anti-PD-L1 ABDs that include a variable heavy domain and/or a variable light domain that are variants of an anti-PD-L1 ABD VH and VL domain disclosed herein. In one embodiment, the variant VH domain and/or VL domain has from 1, 2, 3, 4, 5, 6, 7, 8, 9 or 10 amino acid changes from a VH and/or VL domain of an anti-PD-L1 ABD described herein, including FIGS. 28-31 and the Sequence Listing. In exemplary embodiments, the variant VH domain and/or VL domain has from 1, 2, 3, 4, 5, 6, 7, 8, 9 or 10 amino acid changes from a VH and/or VL domain of one of the following 2G4 ABDs: 2G4[PDL1]_H1L1, 2G4[PDL1]_H1.12_L1.24, 2G4[PDL1]_H1.12_L1.66, 2G4[PDL1]_H1.12_L1.68, 2G4[PDL1]_H1.12_L1.14, 2G4[PDL1]_H1.4_L1.23, 2G4[PDL1]_H1.4_L1.24, 2G4[PDL1]_H1.9_L1, 2G4[PDL1]_H1.62_L1.63, 2G4[PDL1]_H1.6_L1.3, 2G4[PDL1]_H1.61_L0.61, 2G4[PDL1]_H1.60_L1.60, 2G4[PDL1]_H1.59_L1.60, 2G4[PDL1]_H1.14_L1.26, 2G4[PDL1]_H1_L1.27, 2G4[PDL1]_H1.8_L1.26, 2G4[PDL1]_H1_L1.25, 2G4[PDL1]_H1.10_L1.23, 2G4[PDL1]_H1.1_L1.1, 2G4[PDL1]_H1_L1.29, 2.14H9 OPT, atezolizumab, avelumab, 12A4, 3G10, 10A5, h3D10 Var1, h3D10 Var2, h3D10 Var3, h3D10 Var4, h3D10 Var5, h3D10 Var6, h3D10 Var7, h3D10 Var8, h3D10 Var9, h3D10 Var10, h3D10 Var11, h3D10 Var12, h3D10 Var13, h3D10 Var14, Antibody A, C5H9v2, Humanized 29E.2A3, 1B9, 4H1, mAb-42, BAP058-03, BAP058-04, BAP058-06, BAP058-07, BAP058-11, BAP058-13, H6, RC5, SH1A1Q, SH1B3, SHID1, SH1D2, SH1D12, SH1E1, SH1G9, SH1E6, SH1A2, SH1B1, H6B1L, H6A1, H6B1, H6B2, G12, RSA1, RA3, SH1E2, SH1E4, SH1B11, SH1C8, H1H9364P2, H1H9373P2, H1H8314N, and PDL1.3.1 (FIGS. 28-31 and the Sequence Listing).

[0196] In certain embodiments, the anti-PD-L1 ABD is capable of binding to PD-L1, as measured at least one of a Biacore, surface plasmon resonance (SPR) and/or BLI (biolayer interferometry, e.g., Octet assay) assay, with the latter finding particular use in many embodiments. In particular embodiments, the PD-L1 ABD is capable of binding to human and cynomolgus PD-L1.

[0197] In some embodiments, the PD-L1 ABD includes a variable heavy domain that has from 1, 2, 3, 4, 5, 6, 7, 8, 9 or 10 amino acid changes one of the following PD-L1 ABD variable heavy domains: SEQ ID NO:1079, SEQ ID NO:1042, SEQ ID NO:1055, SEQ ID NO:1059, SEQ ID NO:1063, SEQ ID NO: 1067, SEQ ID NO: 1071, SEQ ID NO: 1075, SEQ ID NO:1083, SEQ ID NO:1087, SEQ ID NO:1091, SEQ ID NO:1095, and SEQ ID NO:1099, SEQ ID NOs:736-797. In some embodiments, the PD-L1 ABD includes any of the variable light domains provided herein or a variant thereof.

[0198] In some embodiments, the PD-L1 ABD includes a variable light domain that has from 1, 2, 3, 4, 5, 6, 7, 8, 9 or 10 amino acid changes one of the following PD-L1 ABD variable light domains: SEQ ID NO:1111, SEQ ID NO:1046, SEQ ID NO:1103, SEQ ID NO:1107, SEQ ID NO:1115, SEQ ID NO:1119, SEQ ID NO:1123, SEQ ID NO:1127, SEQ ID NO:1131, SEQ ID NO:1135, SEQ ID NO:1139, SEQ ID NO:1143, SEQ ID NO:1147, SEQ ID NO:1151, SEQ ID NO:1155, and SEQ ID NOs:798-868. In some embodiments, the PD-L1 ABD includes any of the variable heavy domains provided herein or a variant thereof.

[0199] In one embodiment, the variant VH and/or VL domain is at least 90, 95, 97, 98 or 99% identical to the VH and/or VL of an anti-PD-L1 ABD as described herein, including FIGS. 28-31 and the Sequence Listing. In exemplary embodiments, the variant VH and/or VL domain is at least 90, 95, 97, 98 or 99% identical to the VH and/or VL of one of the following 2G4 ABDs: 2G4[PDL1]_H1L1, 2G4[PDL1]_H1.12_L1.24, 2G4[PDL1]_H1.12_L1.66, 2G4[PDL1]_H1.12_L1.68, 2G4[PDL1]_H1.12_L1.14, 2G4[PDL1]_H1.4_L1.23, 2G4[PDL1]_H1.4_L1.24, 2G4[PDL1]_H1.9_L1, 2G4[PDL1]_H1.62_L1.63, 2G4[PDL1]_H1.6_L1.3, 2G4[PDL1]_H1.61_L0.61, 2G4[PDL1]_H1.60_L1.60, 2G4[PDL1]_H1.59_L1.60, 2G4[PDL1]_H1.14_L1.26, 2G4[PDL1]_H1_L1.27, 2G4[PDL1]_H1.8_L1.26, 2G4[PDL1]_H1_L1.25, 2G4[PDL1]_H1.10_L1.23, 2G4[PDL1]_H1.1_L1.1, 2G4[PDL1]_H1_L1.29, 2.14H9 OPT, atezolizumab, avelumab, 12A4, 3G10, 10A5, h3D10 Var1, h3D10 Var2, h3D10 Var3, h3D10 Var4, h3D10 Var5, h3D10 Var6, h3D10 Var7, h3D10 Var8, h3D10 Var9, h3D10 Var10, h3D10 Var11, h3D10 Var12, h3D10 Var13, h3D10 Var14, Antibody A, C5H9v2, Humanized 29E.2A3, 1B9, 4H1, mAb-42, BAP058-03, BAP058-04, BAP058-06, BAP058-07, BAP058-11, BAP058-13, H6, RC5, SH1A1Q, SH1B3, SHID1, SH1D2, SH1D12, SH1E1, SH1G9, SH1E6, SH1A2, SH1B1, H6B1L, H6A1, H6B1, H6B2, G12, RSA1, RA3, SH1E2, SH1E4, SH1B11, SH1C8, H1H9364P2, H1H9373P2, H1H8314N, and PDL1.3.1 (FIGS. 28-31 and the Sequence Listing).

[0200] In certain embodiments, the anti-PD-L1 ABD is capable of binding to PD-L1, as measured by at least one of a Biacore, surface plasmon resonance (SPR) and/or BLI (biolayer interferometry, e.g., Octet assay) assay, with the latter finding particular use in many embodiments. In particular embodiments, the PD-L1 ABD is capable of binding to human and cynomolgus PD-L1.

[0201] In some embodiments, the PD-L1 ABD includes a variable heavy domain that is at least 90, 95, 97, 98 or 99% identical to one of the following PD-L1 ABD variable heavy domains: SEQ ID NO:1079, SEQ ID NO:1042, SEQ ID NO:1055, SEQ ID NO:1059, SEQ ID NO:1063, SEQ ID NO: 1067, SEQ ID NO: 1071, SEQ ID NO: 1075, SEQ ID NO:1083, SEQ ID NO:1087, SEQ ID NO:1091, SEQ ID NO:1095, and SEQ ID NO:1099, SEQ ID NOs:736-797. In some embodiments, the PD-L1 ABD includes any of the variable light domains provided herein or a variant thereof.

[0202] In some embodiments, the PD-L1 ABD includes a variable light domain that is at least 90, 95, 97, 98 or 99% identical to one of the following PD-L1 ABD variable light domains: SEQ ID NO:1111, SEQ ID NO:1046, SEQ ID NO:1103, SEQ ID NO:1107, SEQ ID NO:1115, SEQ ID NO:1119, SEQ ID NO:1123, SEQ ID NO:1127, SEQ ID NO:1131, SEQ ID NO:1135, SEQ ID NO:1139, SEQ ID NO:1143, SEQ ID NO:1147, SEQ ID NO:1151, SEQ ID NO:1155, and SEQ ID NOs:798-868. In some embodiments, the PD-L1 ABD includes any of the variable heavy domains provided herein or a variant thereof.

[0203] In some embodiments, the PD-L1 ABDs have variable heavy and variable light domains that are 90, 95, 97, 98 or 99% identical to the VH and/or VL domains of a PD-L1 ABD as described herein, but the CDRs are identical. In some embodiments, the VH selected from the group consisting of: SEQ ID NO:1079, SEQ ID NO:1042, SEQ ID NO:1055, SEQ ID NO:1059, SEQ ID NO:1063, SEQ ID NO: 1067, SEQ ID NO: 1071, SEQ ID NO: 1075, SEQ ID NO:1083, SEQ ID NO:1087, SEQ ID NO:1091, SEQ ID NO:1095, and SEQ ID NO:1099, SEQ ID NOs:736-797. In some embodiments, the VL is selected from the group consisting of: SEQ ID NO:1111, SEQ ID NO:1046, SEQ ID NO:1103, SEQ ID NO:1107, SEQ ID NO:1115, SEQ ID NO:1119, SEQ ID NO:1123, SEQ ID NO:1127, SEQ ID NO:1131, SEQ ID NO:1135, SEQ ID NO:1139, SEQ ID NO:1143, SEQ ID NO:1147, SEQ ID NO:1151, SEQ ID NO:1155, and SEQ ID NOs:798-868.

[0204] In some embodiments, the PD-L1 ABDs have variable heavy and variable light domains that are 90, 95, 97, 98 or 99% identical to the VH and/or VL domains of a PD-L1 ABD as described herein, and there can be from 0 to 6 amino acid modifications in the CDRs. In some embodiments, the VH selected from the group consisting of: SEQ ID NO:1079, SEQ ID NO:1042, SEQ ID NO:1055, SEQ ID NO:1059, SEQ ID NO: 1063, SEQ ID NO: 1067, SEQ ID NO: 1071, SEQ ID NO: 1075, SEQ ID NO:1083, SEQ ID NO:1087, SEQ ID NO:1091, SEQ ID NO:1095, and SEQ ID NO:1099, SEQ ID NOs:736-797. In some embodiments, the VL is selected from the group consisting of: SEQ ID NO:1111, SEQ ID NO:1046, SEQ ID NO:1103, SEQ ID NO:1107, SEQ ID NO:1115, SEQ ID NO:1119, SEQ ID NO:1123, SEQ ID NO:1127, SEQ ID NO:1131, SEQ ID NO:1135, SEQ ID NO:1139, SEQ ID NO:1143, SEQ ID NO:1147, SEQ ID NO:1151, SEQ ID NO:1155, and SEQ ID NOs:798-868.

[0205] In some embodiments, the PD-L1 ABDs have variable heavy and variable light domains that are 90, 95, 97, 98 or 99% identical to the VH and/or VL domains of a PD-L1 ABD as described herein, and there can be from 0 to 6 amino acid modifications in the CDRs, with no CDR having more than 1 amino acid modification. In some embodiments, the VH selected from the group consisting of: SEQ ID NO:1079, SEQ ID NO:1042, SEQ ID NO:1055, SEQ ID NO:1059, SEQ ID NO:1063, SEQ ID NO: 1067, SEQ ID NO: 1071, SEQ ID NO: 1075, SEQ ID NO:1083, SEQ ID NO:1087, SEQ ID NO:1091, SEQ ID NO:1095, and SEQ ID NO:1099, SEQ ID NOs:736-797. In some embodiments, the VL is selected from the group consisting of: SEQ ID NO:1111, SEQ ID NO:1046, SEQ ID NO:1103, SEQ ID NO:1107, SEQ ID NO:1115, SEQ ID NO:1119, SEQ ID NO:1123, SEQ ID NO:1127, SEQ ID NO:1131, SEQ ID NO:1135, SEQ ID NO:1139, SEQ ID NO:1143, SEQ ID NO:1147, SEQ ID NO:1151, SEQ ID NO:1155, and SEQ ID NOs:798-868.

[0206] In some embodiments, the PD-L1 antigen binding domain includes a variable heavy domain (VH) and a variable light domain (VL) selected from the group consisting of: a VH having an amino acid sequence of SEQ ID NO:1183 and a VL having an amino acid sequence of SEQ ID NO:1187; a VH having an amino acid sequence of SEQ ID NO:1042 and a VL having an amino acid sequence of SEQ ID NO:1047; a VH having an amino acid sequence of SEQ ID NO:1159 and a VL having an amino acid sequence of SEQ ID NO:1163; a VH having an amino acid sequence of SEQ ID NO:1167 and a VL having an amino acid sequence of SEQ ID NO:1171; a VH having an amino acid sequence of SEQ ID NO:1175 and a VL having an amino acid sequence of SEQ ID NO:1179; a VH having an amino acid sequence of SEQ ID NO:1191 and a VL having an amino acid sequence of SEQ ID NO:1195; a VH having an amino acid sequence of SEQ ID NO:1199 and a VL having an amino acid sequence of SEQ ID NO:1203; a VH having an amino acid sequence of SEQ ID NO:1207 and a VL having an amino acid sequence of SEQ ID NO:1211; a VH having an amino acid sequence of SEQ ID NO:1215 and a VL having an amino acid sequence of SEQ ID NO:1219; a VH having an amino acid sequence of SEQ ID NO:1223 and a VL having an amino acid sequence of SEQ ID NO:1227; a VH having an amino acid sequence of SEQ ID NO:1231 and a VL having an amino acid sequence of SEQ ID NO:1235; a VH having an amino acid sequence of SEQ ID NO:1239 and a VL having an amino acid sequence of SEQ ID NO:1243; a VH having an amino acid sequence of SEQ ID NO:1247 and a VL having an amino acid sequence of SEQ ID NO:1251; a VH having an amino acid sequence of SEQ ID NO:1255 and a VL having an amino acid sequence of SEQ ID NO:1259; a VH having an amino acid sequence of SEQ ID NO:1263 and a VL having an amino acid sequence of SEQ ID NO:1267; a VH having an amino acid sequence of SEQ ID NO:1271 and a VL having an amino acid sequence of SEQ ID NO:1275; a VH having an amino acid sequence of SEQ ID NO:1279 and a VL having an amino acid sequence of SEQ ID NO:1283; a VH having an amino acid sequence of SEQ ID NO:1287 and a VL having an amino acid sequence of SEQ ID NO:1291; a VH having an amino acid sequence of SEQ ID NO:1295 and a VL having an amino acid sequence of SEQ ID NO:1299; and a VH having an amino acid sequence of SEQ ID NO:1303 and a VL having an amino acid sequence of SEQ ID NO:1307.

[0207] In certain embodiments, the PD-L1 ABD is capable of binding to the PD-L1, as measured by at least one of a Biacore, surface plasmon resonance (SPR) and/or BLI (biolayer interferometry, e.g., Octet assay) assay, with the latter finding particular use in many embodiments. In particular embodiments, the CD28 ABD is capable of binding human PD-L1 (see FIG. 2) at detectable limits of the assay.

[0208] In some embodiments, the PD-L1 antigen binding domain provided herein includes one or more of the sequences depicted in FIG. 71. In some embodiments, the PD-L1 antigen binding domain includes at least one of the HCDR1-3 and/or LCDR1-3 sequences of FIG. 71. In some embodiments, the PD-L1 antigen binding domain includes at least one of the HFR1-4 and/or LFR1-4 sequences of FIG. 71.

[0209] Such PD-L1 binding domains can be included in any of the antibodies provided herein including, for example, “1+1 Fab-scFv-Fc,” “2+1 Fab₂-scFv-Fc,” “2+1 mAb-scFv,” “1+1 common light chain,” and “2+1 common light chain” antibodies.

### B. CD28 Antigen Binding Domains

[0210] In one aspect, provided herein are CD28 antigen binding domains (ABDs) and compositions that include such CD28 antigen binding domains (e.g., antibodies, including the heterodimeric antibodies provided herein). In some embodiments, the CD28 antigen binding domain described herein are agonistic CD28 ABDs that advantageously provide costimulatory activity. Thus, such CD28 ABDs provided herein are useful of enhancing immune responses, for example, when used in combination with other therapeutics (e.g., anti-cancer therapeutics for the treatment of particular cancers).

[0211] As will be appreciated by those in the art, suitable CD28 binding domains can comprise a set of 6 CDRs as depicted in the Sequence Listing and Figures, either as they are underlined or, in the case where a different numbering scheme is used as described herein and as shown in Table 2, as the CDRs that are identified using other alignments within the variable heavy (VH) domain and variable light domain (VL) sequences of those depicted in FIGS. 18-23 and the Sequence Listing. Suitable CD28 ABDs can also include the entire VH and VL sequences as depicted in these sequences and figures, used as scFvs or as Fabs.

[0212] In one embodiment, the CD28 antigen binding domain includes the 6 CDRs (i.e., vhCDR1-3 and vlCDR1-3) of any of the CD28 binding domains described herein, including the Figures and Sequence Listing. In some embodiments, the CD28 ABD is one of the following CD28 ABDs:

[0213] In exemplary embodiments, the CD28 ABD is one of the following CD28 ABDs: 1A7[CD28]_H1L1, 1A7[CD28]_H1.14L1, 1A7[CD28]_L1H1.14, 1A7[CD28]_H1.1L1, 1A7[CD28]_H1L1.71, 1A7[CD28]_H1.14L1.71, 1A7[CD28]_L1.71H1.14, 1A7[CD28]_H1.1L1.71, and HuTN228[CD28]_H1L1 (FIGS. 18-23 and the Sequence Listing).

[0214] In addition to the parental CDR sets disclosed in the figures and sequence listing that form an ABD to CD28, provided herein are variant CD28 ABDS having CDRs that include at least one modification of the CD28 ABD CDRs disclosed herein (e.g., FIGS. 18-23 or the Sequence Listing). In one embodiment, the CD28 ABD includes a set of 6 CDRs with 1, 2, 3, 4, 5, 6, 7, 8, 9, 10 amino acid modifications as compared to the 6 CDRs of a CD28 ABD as described herein, including the figures and sequence listing. In exemplary embodiments, the CD28 ABD includes a set of 6 CDRs with 1, 2, 3, 4, 5, 6, 7, 8, 9, 10 amino acid modifications as compared to the 6 CDRs of one of the following CD28 ABDs: 1A7[CD28]_H1L1, 1A7[CD28]_H1.14L1, 1A7[CD28]_L1H1.14, 1A7[CD28]_H1.1L1, 1A7[CD28]_H1L1.71, 1A7[CD28]_H1.14L1.71, 1A7[CD28]_L1.71H1.14, 1A7[CD28]_H1.1L1.71, HuTN228[CD28]_H1L1, CD28.3[CD28]_H0L0, hCD28.3[CD28]_H1L1, 5.11A1[CD28]_H0L0, TGN1412_H1L1, 341VL34[CD28]_H1L1, 341VL36[CD28]_H1L1, 281VL4[CD28]_H1L1, PV1[CD28]_H0L0, m9.3[CD28]_H0L0, and hu9.3[CD28]_H1L1 or a variant thereof (FIGS. 18-23 and the Sequence Listing).

[0215] In certain embodiments, the CD28 ABD is capable of binding CD28 antigen, as measured by at least one of a Biacore, surface plasmon resonance (SPR) and/or BLI (biolayer interferometry, e.g., Octet assay) assay, with the latter finding particular use in many embodiments. In particular embodiments, the CD28 ABD is capable of binding human CD28 antigen (see FIG. 1).

[0216] In some embodiments, the CD28 ABD includes variable heavy and variable light domains that are at least 90, 95, 97, 98 or 99% identical to the VH and VL domains of a CD28 ABD as described herein, including the figures and sequence listing. In exemplary embodiments, the CD28 ABD includes VH and VL domains that are at least 90, 95, 97, 98 or 99% identical to the 6 CDRs of one of the following CD28 ABDs: 1A7[CD28]_H1L1, 1A7[CD28]_H1.14L1, 1A7[CD28]_L1H1.14, 1A7[CD28]_H1.1L1, 1A7[CD28]_H1L1.71, 1A7[CD28]_H1.14L1.71, 1A7[CD28]_L1.71H1.14, 1A7[CD28]_H1.1L1.71, HuTN228[CD28]_H1L1, CD28.3[CD28]_H0L0, hCD28.3[CD28]_H1L1, 5.11A1[CD28]_H0L0, TGN1412_H1L1, 341VL34[CD28]_H1L1, 341VL36[CD28]_H1L1, 281VL4[CD28]_H1L1, PV1[CD28]_H0L0, m9.3[CD28]_H0L0, and hu9.3[CD28]_H1L1 or a variant thereof (FIGS. 18-23 and the Sequence Listing). In some embodiments, the VH selected from the group consisting of: SEQ ID NO:998, SEQ ID NO:984, SEQ ID NO:994 and SEQ ID NOs:561-629. In some embodiments, the VL is selected from the group consisting of: SEQ ID NO:1002, SEQ ID NO:984, and SEQ ID Nos:630-735 or a variant thereof.

[0217] In some embodiments, the CD28 ABDs have variable heavy and variable light domains that are 90, 95, 97, 98 or 99% identical to the VH and/or VL domains of a CD28 ABD as described herein, but the CDRs are identical. In some embodiments, the VH selected from the group consisting of: SEQ ID NO:998, SEQ ID NO:984, SEQ ID NO:994 and SEQ ID NOs:561-629. In some embodiments, the VL is selected from the group consisting of: SEQ ID NO:1002, SEQ ID NO:984, and SEQ ID Nos:630-735 or a variant thereof.

[0218] In some embodiments, the CD28 ABDs have variable heavy and variable light domains that are 90, 95, 97, 98 or 99% identical to the VH and/or VL domains of a CD28 ABD as described herein, and there can be from 0 to 6 amino acid modifications in the CDRs. In some embodiments, the VH selected from the group consisting of: SEQ ID NO:998, SEQ ID NO:984, SEQ ID NO:994 and SEQ ID NOs:561-629. In some embodiments, the VL is selected from the group consisting of: SEQ ID NO: 1002, SEQ ID NO:984, and SEQ ID Nos:630-735 or a variant thereof.

[0219] In some embodiments, the CD28 ABDs have variable heavy and variable light domains that are 90, 95, 97, 98 or 99% identical to the VH and/or VL domains of a CD28 ABD as described herein, and there can be from 0 to 6 amino acid modifications in the CDRs, with no CDR having more than 1 amino acid modification. In some embodiments, the VH selected from the group consisting of: SEQ ID NO:998, SEQ ID NO:984, SEQ ID NO:994 and SEQ ID NOs:561-629. In some embodiments, the VL is selected from the group consisting of: SEQ ID NO: 1002, SEQ ID NO:984, and SEQ ID Nos:630-735 or a variant thereof.

[0220] In certain embodiments, the CD28 ABD is capable of binding to the CD28, as measured by at least one of a Biacore, surface plasmon resonance (SPR) and/or BLI (biolayer interferometry, e.g., Octet assay) assay, with the latter finding particular use in many embodiments. In particular embodiments, the CD28 ABD is capable of binding human CD28 antigen (see FIG. 1) at detectable limits of the assay.

[0221] In another exemplary embodiment, the CD28 ABD include the variable heavy (VH) domain and/or variable light (VL) domain of any one of the CD28 ABDs described herein, including the figures and sequence listing. In exemplary embodiments, the CD28 ABD is one of the following CD28 ABDs: 1A7[CD28]_H1L1, 1A7[CD28]_H1.14L1, 1A7[CD28]_L1H1.14, 1A7[CD28]_H1.1L1, 1A7[CD28]_H1L1.71, 1A7[CD28]_H1.14L1.71, 1A7[CD28]_L1.71H1.14, 1A7[CD28]_H1.1L1.71, HuTN228[CD28]_H1L1, CD28.3[CD28]_H0L0, hCD28.3[CD28]_H1L1, 5.11A1[CD28]_H0L0, TGN1412_H1L1, 341VL34[CD28]_H1L1, 341VL36[CD28]_H1L1, 281VL4[CD28]_H1L1, PV1[CD28]_H0L0, m9.3[CD28]_H0L0, and hu9.3[CD28]_H1L1 or a variant thereof (FIGS. 18-23 and the Sequence Listing). Any of the CD28 ABD variable heavy domains or variants thereof disclosed herein can be combined with any of the variable light domains or variants thereof described herein to form CD28 ABDs for use in any of the antibody formats provided herein.

[0222] In addition to the parental CD28 variable heavy and variable light domains disclosed herein, provided herein are CD28 ABDs that include a variable heavy domain and/or a variable light domain that are variants of a CD28 ABD VH and VL domain disclosed herein. In one embodiment, the variant VH domain and/or VL domain has from 1, 2, 3, 4, 5, 6, 7, 8, 9 or 10 amino acid changes from a VH and/or VL domain of a CD28 ABD described herein, including the figures and sequence listing. In exemplary embodiments, the variant VH domain and/or VL domain has from 1, 2, 3, 4, 5, 6, 7, 8, 9 or 10 amino acid changes from a VH and/or VL domain of one of the following CD28 ABDs: 1A7[CD28]_H1L1, 1A7[CD28]_H1.14L1, 1A7[CD28]_L1H1.14, 1A7[CD28]_H1.1L1, 1A7[CD28]_H1L1.71, 1A7[CD28]_H1.14L1.71, 1A7[CD28]_L1.71H1.14, 1A7[CD28]_H1.1L1.71, and HuTN228[CD28]_H1L1, CD28.3[CD28]_H0L0, hCD28.3[CD28]_H1L1, 5.11A1[CD28]_H0L0, TGN1412_H1L1, 341VL34[CD28]_H1L1, 341VL36[CD28]_H1L1, 281VL4[CD28]_H1L1, PV1[CD28]_H0L0, m9.3[CD28]_H0L0, and hu9.3[CD28]_H1L1 or a variant thereof (FIGS. 18-23 and the Sequence Listing). In certain embodiments, the CD28 ABD is capable of binding to CD28, as measured at least one of a Biacore, surface plasmon resonance (SPR) and/or BLI (biolayer interferometry, e.g., Octet assay) assay, with the latter finding particular use in many embodiments. In particular embodiments, the CD28 ABD is capable of binding human CD28 antigen (see FIG. 1).

[0223] In one embodiment, the variant VH and/or VL domain is at least 90, 95, 97, 98 or 99% identical to the VH and/or VL of a CD28 ABD as described herein, including the figures and sequence listing. In exemplary embodiments, the variant VH and/or VL domain is at least 90, 95, 97, 98 or 99% identical to the VH and/or VL of one of the following CD28 ABDs: 1A7[CD28]_H1L1, 1A7[CD28]_H1.14L1, 1A7[CD28]_L1H1.14, 1A7[CD28]_H1.1L1, 1A7[CD28]_H1L1.71, 1A7[CD28]_H1.14L1.71, 1A7[CD28]_L1.71H1.14, 1A7[CD28]_H1.1L1.71, HuTN228[CD28]_H1L1, CD28.3[CD28]_H0L0, hCD28.3[CD28]_H1L1, 5.11A1[CD28]_H0L0, TGN1412_H1L1, 341VL34[CD28]_H1L1, 341VL36[CD28]_H1L1, 281VL4[CD28]_H1L1, PV1[CD28]_H0L0, m9.3[CD28]_H0L0, and hu9.3[CD28]_H1L1 or a variant thereof (FIGS. 18-23 and the Sequence Listing). In certain embodiments, the CD28 ABD is capable of binding to CD28, as measured by at least one of a Biacore, surface plasmon resonance (SPR) and/or BLI (biolayer interferometry, e.g., Octet assay) assay, with the latter finding particular use in many embodiments. In particular embodiments, the CD28 ABD is capable of binding human CD28 antigen (see FIG. 1).

[0224] In one embodiment, the CD28 antigen binding domain includes a variable heavy domain (VH) having the vhCDR1-3 (i.e., vhCDR1-3) of 1A7_H1.14 (FIG. 19). In some embodiments, the CD28 antigen binding domain further includes any of the CD28 binding domain variable light domains provided herein. In exemplary embodiments, the variable light domain is 1A7_L1.71 (FIG. 20) or a variant thereof. In certain embodiments, the CD28 ABD is capable of binding CD28 antigen, as measured by at least one of a Biacore, surface plasmon resonance (SPR) and/or BLI (biolayer interferometry, e.g., Octet assay) assay, with the latter finding particular use in many embodiments. In particular embodiments, the CD28 ABD is capable of binding human CD28 antigen (see FIG. 1). Such CD28 binding domains can be included in any of the antibodies provided herein including, for example, “1+1 Fab-scFv-Fc,” “2+1 Fab₂-scFv-Fc,” “2+1 mAb-scFv,” “1+1 common light chain,” and “2+1 common light chain” antibodies.

[0225] In one embodiment, the CD28 ABD includes a variable heavy domain (VH) having vhCDR1-3s with 1, 2, 3, 4, 5, 6, 7, 8, 9, 10 amino acid modifications as compared to the vhCDR1-3 of 1A7_H1.14 (FIG. 19). In some embodiments, the CD28 antigen binding domain further includes any of the CD28 binding domain variable light domains provided herein. In exemplary embodiments, the variable light domain is 1A7_L1.71 (FIG. 20) or a variant thereof. In certain embodiments, the CD28 ABD is capable of binding CD28 antigen, as measured by at least one of a Biacore, surface plasmon resonance (SPR) and/or BLI (biolayer interferometry, e.g., Octet assay) assay, with the latter finding particular use in many embodiments. In particular embodiments, the CD28 ABD is capable of binding human CD28 antigen (see FIG. 1). Such CD28 binding domains can be included in any of the antibodies provided herein including, for example, “1+1 Fab-scFv-Fc,” “2+1 Fab₂-scFv-Fc,” “2+1 mAb-scFv,” “1+1 common light chain,” and “2+1 common light chain” antibodies.

[0226] In some embodiments, the CD28 ABD includes a variable heavy domain (VH) having vhCDR1-3s that are at least 90, 95, 97, 98 or 99% identical to the 6 vhCDR1-3 of 1A7_H1.14 (FIG. 19). In some embodiments, the CD28 antigen binding domain further includes any of the CD28 binding domain variable light domains provided herein. In exemplary embodiments, the variable light domain is 1A7_L1.71 (FIG. 20) or a variant thereof. In certain embodiments, the CD28 ABD is capable of binding to the CD28, as measured by at least one of a Biacore, surface plasmon resonance (SPR) and/or BLI (biolayer interferometry, e.g., Octet assay) assay, with the latter finding particular use in many embodiments. In particular embodiments, the CD28 ABD is capable of binding human CD28 antigen (see FIG. 1). Such CD28 binding domains can be included in any of the antibodies provided herein including, for example, “1+1 Fab-scFv-Fc,” “2+1 Fab₂-scFv-Fc,” “2+1 mAb-scFv,” “1+1 common light chain,” and “2+1 common light chain” antibodies.

[0227] In another exemplary embodiment, the CD28 ABD include the variable heavy (VH) domain 1A7_H1.14 (FIG. 19). In some embodiments, the CD28 antigen binding domain further includes any of the CD28 binding domain variable light domains provided herein. In exemplary embodiments, the variable light domain is 1A7_L1.14 (FIG. 20) or a variant thereof. In certain embodiments, the CD28 ABD is capable of binding to the CD28, as measured by at least one of a Biacore, surface plasmon resonance (SPR) and/or BLI (biolayer interferometry, e.g., Octet assay) assay, with the latter finding particular use in many embodiments. In particular embodiments, the CD28 ABD is capable of binding human CD28 antigen (see FIG. 1). Such CD28 binding domains can be included in any of the antibodies provided herein including, for example, “1+1 Fab-scFv-Fc,” “2+1 Fab₂-scFv-Fc,” “2+1 mAb-scFv,” “1+1 common light chain,” and “2+1 common light chain” antibodies.

[0228] In addition to the parental CD28 variable heavy domains disclosed herein, provided herein are CD28 ABDs that include a variable heavy domain that is a variant of 1A7_H1.14 (FIG. 19). In one embodiment, the variant VH domain has from 1, 2, 3, 4, 5, 6, 7, 8, 9 or 10 amino acid changes from 1A7_H1.14 (FIG. 19). In some embodiments, the CD28 antigen binding domain further includes any of the CD28 binding domain variable light domains provided herein. In exemplary embodiments, the variable light domain is 1A7_L1.71 (FIG. 20) or a variant thereof. In certain embodiments, the CD28 ABD is capable of binding to CD28, as measured at least one of a Biacore, surface plasmon resonance (SPR) and/or BLI (biolayer interferometry, e.g., Octet assay) assay, with the latter finding particular use in many embodiments. In particular embodiments, the CD28 ABD is capable of binding human CD28 antigen (see FIG. 1). Such CD28 binding domains can be included in any of the antibodies provided herein including, for example, “1+1 Fab-scFv-Fc,” “2+1 Fab₂-scFv-Fc,” “2+1 mAb-scFv,” “1+1 common light chain,” and “2+1 common light chain” antibodies.

[0229] In one embodiment, the variant VH domain is at least 90, 95, 97, 98 or 99% identical to 1A7_H1.14 (FIG. 19). In some embodiments, the CD28 antigen binding domain further includes any of the CD28 binding domain variable light domains provided herein. In exemplary embodiments, the variable light domain is 1A7_L1.71 (FIG. 20) or a variant thereof. In certain embodiments, the CD28 ABD is capable of binding to CD28, as measured by at least one of a Biacore, surface plasmon resonance (SPR) and/or BLI (biolayer interferometry, e.g., Octet assay) assay, with the latter finding particular use in many embodiments. In particular embodiments, the CD28 ABD is capable of binding human CD28 antigen (see FIG. 1). Such CD28 binding domains can be included in any of the antibodies provided herein including, for example, “1+1 Fab-scFv-Fc,” “2+1 Fab₂-scFv-Fc,” “2+1 mAb-scFv,” “1+1 common light chain,” and “2+1 common light chain” antibodies.

[0230] In some embodiments, the CD28 antigen binding domain provided herein includes one or more of the sequences depicted in FIG. 70. In some embodiments, the CD28 antigen binding domain includes at least one of the HCDR1-3 and/or LCDR1-3 sequences of FIG. 70. In some embodiments, the CD28 antigen binding domain includes at least one of the HFR1-4 and/or LFR1-4 sequences of FIG. 70.

[0231] Specific anti-CD28 ABDs of interest include a VH domain with an amino acid sequence selected from the group consisting of SEQ ID NO:998, SEQ ID NO:984, SEQ ID NO:994 and SEQ ID NOs:561-629 or a variant thereof, paired with a VL domain of SEQ ID NO:1002, SEQ ID NO:984, and SEQ ID Nos:630-735 or a variant thereof.

[0232] In some cases, the VH and VL of the CD28 binding domain is selected from the following VH and VLs, respectively: SEQ ID NO:1030 and SEQ ID NO:1034; SEQ ID NO:1006 and SEQ ID NO:1010; SEQ ID NO:1014 and SEQ ID NO:1018; and SEQ ID NO:1022 and SEQ ID NO:1026

[0233] In other cases, the VH and VL of the CD28 binding domain is selected from the following VH and VLs, respectively: SEQ ID NOs:1 and 5, SEQ ID NOs:9 and 13, SEQ ID NOs:17 and 21, SEQ ID NOs:25 and 29, SEQ ID NOs:33 and 37, SEQ ID NOs:41 and 46, SEQ ID NOs:49 and 53, SEQ ID NOs:57 and 61, SEQ ID NOs:65 and 69, SEQ ID NOs:73 and 77, and SEQ ID NOs:81 and 85. or variants thereof.

### V. Antibodies

[0234] In one aspect provided herein are anti-CD28 antibodies and anti-PD-L1 antibodies. Antibodies provided herein can include any of the PD-L1 and/or CD28 binding domains provided herein (e.g., “1+1 Fab-scFv-Fc,” “2+1 Fab₂-scFv-Fc,” “2+1 mAb-scFv,” “1+1 common light chain,” and “2+1 common light chain” antibodies).

[0235] The antibodies provided herein include different antibody domains. As described herein and known in the art, the antibodies described herein include different domains within the heavy and light chains, which can be overlapping as well. These domains include, but are not limited to, the Fc domain, the CH1 domain, the CH2 domain, the CH3 domain, the hinge domain, the heavy constant domain (CH1-hinge-Fc domain or CH1-hinge-CH2-CH3), the variable heavy domain, the variable light domain, the light constant domain, Fab domains and scFv domains.

[0236] As shown herein, there are a number of suitable linkers (for use as either domain linkers or scFv linkers) that can be used to covalently attach the recited domains (e.g., scFvs, Fabs, Fc domains, etc.), including traditional peptide bonds, generated by recombinant techniques. Exemplary linkers to attach domains of the subject antibody to each other are depicted in FIG. 7. In some embodiments, the linker peptide may predominantly include the following amino acid residues: Gly, Ser, Ala, or Thr. The linker peptide should have a length that is adequate to link two molecules in such a way that they assume the correct conformation relative to one another so that they retain the desired activity. In one embodiment, the linker is from about 1 to 50 amino acids in length, preferably about 1 to 30 amino acids in length. In one embodiment, linkers of 1 to 20 amino acids in length may be used, with from about 5 to about 10 amino acids finding use in some embodiments. Useful linkers include glycine-serine polymers, including for example (GS)n, (GSGGS)n, (GGGGS)n, and (GGGS)n, where n is an integer of at least one (and generally from 3 to 4), glycine-alanine polymers, alanine-serine polymers, and other flexible linkers. Alternatively, a variety of nonproteinaceous polymers, including but not limited to polyethylene glycol (PEG), polypropylene glycol, polyoxyalkylenes, or copolymers of polyethylene glycol and polypropylene glycol, may find use as linkers.

[0237] Other linker sequences may include any sequence of any length of CL/CH1 domain but not all residues of CL/CH1 domain; for example the first 5-12 amino acid residues of the CL/CH1 domains. Linkers can be derived from immunoglobulin light chain, for example Cκ or Cλ. Linkers can be derived from immunoglobulin heavy chains of any isotype, including for example Cγ1, Cγ2, Cγ3, Cγ4, Cα1, Cα2, Cδ, Cε, and Cμ. Linker sequences may also be derived from other proteins such as Ig-like proteins (e.g., TCR, FcR, KTR), hinge region-derived sequences, and other natural sequences from other proteins.

[0238] In some embodiments, the linker is a “domain linker”, used to link any two domains as outlined herein together. For example, in the 2+1 Fab₂-scFv-Fc format, there may be a domain linker that attaches the C-terminus of the CH1 domain of the Fab to the N-terminus of the scFv, with another optional domain linker attaching the C-terminus of the scFv to the CH2 domain (although in many embodiments the hinge is used as this domain linker). While any suitable linker can be used, many embodiments utilize a glycine-serine polymer as the domain linker, including for example (GS)n, (GSGGS)n, (GGGGS)n, and (GGGS)n, where n is an integer of at least one (and generally from 3 to 4 to 5) as well as any peptide sequence that allows for recombinant attachment of the two domains with sufficient length and flexibility to allow each domain to retain its biological function. In some cases, and with attention being paid to “strandedness”, as outlined below, charged domain linkers, as used in some embodiments of scFv linkers can be used. Exemplary useful domain linkers are depicted in FIG. 7.

[0239] In some embodiments, the linker is a scFv linker that is used to covalently attach the VH and VL domains as discussed herein. In many cases, the scFv linker is a charged scFv linker, a number of which are shown in FIG. 6. Accordingly, provided herein are charged scFv linkers, to facilitate the separation in pI between a first and a second monomer. That is, by incorporating a charged scFv linker, either positive or negative (or both, in the case of scaffolds that use scFvs on different monomers), this allows the monomer comprising the charged linker to alter the pI without making further changes in the Fc domains. These charged linkers can be substituted into any scFv containing standard linkers. Again, as will be appreciated by those in the art, charged scFv linkers are used on the correct “strand” or monomer, according to the desired changes in pI. For example, as discussed herein, to make 1+1 Fab-scFv-Fc format heterodimeric antibody, the original pI of the Fv region for each of the desired antigen binding domains are calculated, and one is chosen to make an scFv, and depending on the pI, either positive or negative linkers are chosen.

[0240] Charged domain linkers can also be used to increase the pI separation of the monomers of the invention as well, and thus those included in FIG. 6 can be used in any embodiment herein where a linker is utilized.

[0241] The PD-L1 binding domains and CD28 binding domains provided can be included in any useful antibody format including, for example, canonical immunoglobulin, as well as the “1+1 Fab-scFv-Fc,” “2+1 Fab₂-scFv-Fc,” “2+1 mAb-scFv,” “1+1 common light chain,” and “2+1 common light chain” formats provided herein (see, e.g., FIGS. 26 and 27). Other useful antibody formats include, but are not limited to, “mAb-Fv,” “mAb-scFv,” “central-Fv”, “one armed scFv-mAb,” “scFv-mAb,” “dual scFv,” and “trident” format antibodies, as disclosed in US20180127501A1, which is incorporated by reference herein, particularly in pertinent part relating to antibody formats (see, e.g., FIG. 2).

[0242] In some embodiments, the subject antibody includes one or more of the PD-L1 ABDs provided herein. In some embodiments, the antibody includes one PD-L1 ABD. In other embodiments, the antibody includes two PD-L1 ABDs.

[0243] In an exemplary embodiment, the antibody is a bispecific antibody that includes one or two PD-L1 ABDs, including any of the PD-L1 ABDs provided herein. Bispecific antibody that include such PD-L1 ABDs include, for example, “1+1 Fab-scFv-Fc,” “2+1 Fab₂-scFv-Fc,” “2+1 mAb-scFv,” “1+1 common light chain,” and “2+1 common light chain” bispecifics format antibodies (FIGS. 26 and 27). In exemplary embodiments, the PD-L1 ABD is selected from those in FIGS. 28-31, as well as FIGS. 15, 73 and 78 of U.S. Pat. No. 10,793,632, as well as SEQ ID NOs:3961 to 4432 of that application. In exemplary embodiments, the PD-L1 ABD is one of the following 2G4 ABDs: 2G4[PDL1]_H1L1, 2G4[PDL1]_H1.12_L1.24, 2G4[PDL1]_H1.12_L1.66, 2G4[PDL1]_H1.12_L1.68, 2G4[PDL1]_H1.12_L1.14, 2G4[PDL1]_H1.4_L1.23, 2G4[PDL1]_H1.4_L1.24, 2G4[PDL1]_H1.9_L1, 2G4[PDL1]_H1.62_L1.63, 2G4[PDL1]_H1.6_L1.3, 2G4[PDL1]_H1.61_L1.61, 2G4[PDL1]_H1.60_L1.60, 2G4[PDL1]_H1.59_L1.60, 2G4[PDL1]_H1.14_L1.26, 2G4[PDL1]_H1_L1.27, 2G4[PDL1]_H1.8_L1.26, 2G4[PDL1]_H1_L1.25, 2G4[PDL1]_H1.10_L1.23, 2G4[PDL1]_H1.1_L1.1, 2G4[PDL1]_H1_L1.29 (FIGS. 28-31). In exemplary embodiments the PD-L1 binding domains is a Fab. In some embodiments, such bispecific antibodies are heterodimeric bispecific antibodies that include any of the heterodimerization skew variants, pI variants and/or ablation variants described herein. See FIG. 8.

[0244] In some embodiments, the subject antibody includes one or more of the CD28 ABDs provided herein. In some embodiments, the antibody includes one CD28 ABD. In other embodiments, the antibody includes two CD28 ABDs. In exemplary embodiments, the antibody includes the variable heavy domain and variable light domain of one of the CD28 ABDs: 1A7[CD28]_H1L1, 1A7[CD28]_H1.14L1, 1A7[CD28]_L1H1.14, 1A7[CD28]_H1.1L1, 1A7[CD28]_H1L1.71, 1A7[CD28]_H1.14L1.71, 1A7[CD28]_L1.71H1.14, 1A7[CD28]_H1.1L1.71, HuTN228[CD28]_H1L1, CD28.3[CD28]_H0L0, hCD28.3[CD28]_H1L1, 5.11A1[CD28]_H0L0, TGN1412_H1L1, 341VL34[CD28]_H1L1, 341VL36[CD28]_H1L1, 281VL4[CD28]_H1L1, PV1[CD28]_H0L0, m9.3[CD28]_H0L0, and hu9.3[CD28]_H1L1 or a variant thereof (FIGS. 18-23 and the Sequence Listing).

[0245] In an exemplary embodiment, the antibody is a bispecific antibody that includes one or two CD28 ABDs, including any of the CD28 ABDs provided herein. Bispecific antibody that include such CD28 ABDs include, for example, “1+1 Fab-scFv-Fc,” “2+1 Fab₂-scFv-Fc,” “2+1 mAb-scFv,” “1+1 common light chain,” and “2+1 common light chain” bispecifics format antibodies (FIG. 21). In exemplary embodiments, the CD28 ABD is one of the following CD28 ABDs: 1A7[CD28]_H1L1, 1A7[CD28]_H1.14L1, 1A7[CD28]_L1H1.14, 1A7[CD28]_H1.1L1, 1A7[CD28]_H1L1.71, 1A7[CD28]_H1.14L1.71, 1A7[CD28]_L1.71H1.14, 1A7[CD28]_H1.1L1.71, HuTN228[CD28]_H1L1, CD28.3[CD28]_H0L0, hCD28.3[CD28]_H1L1, 5.11A1[CD28]_H0L0, TGN1412_H1L1, 341VL34[CD28]_H1L1, 341VL36[CD28]_H1L1, 281VL4[CD28]_H1L1, PV1[CD28]_H0L0, m9.3[CD28]_H0L0, and hu9.3[CD28]_H1L1 or a variant thereof (FIGS. 18-23 and the Sequence Listing). In exemplary embodiments, the CD28 ABD is an anti-CD28 scFv included in an “1+1 Fab-scFv-Fc,” or “2+1 Fab₂-scFv-Fc bispecifics format antibodies (FIG. 21). In some embodiments, such bispecific antibodies are heterodimeric bispecific antibodies that include any of the heterodimerization skew variants, pI variants and/or ablation variants described herein. See FIG. 8.

### A. Chimeric and Humanized Antibodies

[0246] In certain embodiments, the subject antibodies provided herein include a heavy chain variable region from a particular germline heavy chain immunoglobulin gene and/or a light chain variable region from a particular germline light chain immunoglobulin gene. For example, such antibodies may comprise or consist of a human antibody comprising heavy or light chain variable regions that are “the product of” or “derived from” a particular germline sequence. A human antibody that is “the product of” or “derived from” a human germline immunoglobulin sequence can be identified as such by comparing the amino acid sequence of the human antibody to the amino acid sequences of human germline immunoglobulins and selecting the human germline immunoglobulin sequence that is closest in sequence (i.e., greatest % identity) to the sequence of the human antibody (using the methods outlined herein). A human antibody that is “the product of” or “derived from” a particular human germline immunoglobulin sequence may contain amino acid differences as compared to the germline sequence, due to, for example, naturally-occurring somatic mutations or intentional introduction of site-directed mutation. However, a humanized antibody typically is at least 90% identical in amino acids sequence to an amino acid sequence encoded by a human germline immunoglobulin gene and contains amino acid residues that identify the antibody as being derived from human sequences when compared to the germline immunoglobulin amino acid sequences of other species (e.g., murine germline sequences). In certain cases, a humanized antibody may be at least 95, 96, 97, 98 or 99%, or even at least 96%, 97%, 98%, or 99% identical in amino acid sequence to the amino acid sequence encoded by the germline immunoglobulin gene. Typically, a humanized antibody derived from a particular human germline sequence will display no more than 10-20 amino acid differences from the amino acid sequence encoded by the human germline immunoglobulin gene (prior to the introduction of any skew, pI and ablation variants herein; that is, the number of variants is generally low, prior to the introduction of the variants of the invention). In certain cases, the humanized antibody may display no more than 5, or even no more than 4, 3, 2, or 1 amino acid difference from the amino acid sequence encoded by the germline immunoglobulin gene (again, prior to the introduction of any skew, pI and ablation variants herein; that is, the number of variants is generally low, prior to the introduction of the variants of the invention).

[0247] In one embodiment, the parent antibody has been affinity matured, as is known in the art. Structure-based methods may be employed for humanization and affinity maturation, for example as described in U.S. Ser. No. 11/004,590. Selection based methods may be employed to humanize and/or affinity mature antibody variable regions, including but not limited to methods described in Wu et al., 1999, J. Mol. Biol. 294:151-162; Baca et al., 1997, J. Biol. Chem. 272(16):10678-10684; Rosok et al., 1996, J. Biol. Chem. 271(37): 22611-22618; Rader et al., 1998, Proc. Natl. Acad. Sci. USA 95: 8910-8915; Krauss et al., 2003, Protein Engineering 16(10):753-759, all entirely incorporated by reference. Other humanization methods may involve the grafting of only parts of the CDRs, including but not limited to methods described in U.S. Ser. No. 09/810,510; Tan et al., 2002, J. Immunol. 169:1119-1125; De Pascalis et al., 2002, J. Immunol. 169:3076-3084, all entirely incorporated by reference.

### B. Anti-CD28×Anti-PD-L1 Antibodies

[0248] In another aspect, provided herein are anti-CD28×anti-PD-L1 antibodies. In some embodiments, the anti-CD28×anti-PD-L1 antibody includes an agonistic CD28 binding domain that provides co-stimulatory function by binding to CD28 on T cells. As such, the anti-CD28×anti-PD-L1 antibody provided herein enhance immune responses selectively at tumor sites that express PD-L1. In some embodiments, the anti-CD28×anti-PD-L1 antibody is a bispecific antibody. In some embodiments, the anti-CD28×anti-PD-L1 antibody is a trispecific antibody. In some embodiments, the anti-CD28×anti-PD-L1 antibody is a bivalent antibody. In some embodiments, the anti-CD28×anti-PD-L1 antibody is a trivalent antibody. In some embodiments, the anti-CD28×anti-PD-L1 antibody is a bispecific, bivalent antibody. In exemplary embodiments, the anti-CD28×anti-PD-L1 antibody is a bispecific, trivalent antibody.

[0249] As is more fully outlined herein, the anti-CD28×anti-PD-L1 antibody can be in a variety of formats, as outlined below. Exemplary formats include the “1+1 Fab-scFv-Fc,” “2+1 Fab₂-scFv-Fc,” “1+1 common light chain,” and “2+1 common light chain” formats provided herein (see, e.g., FIGS. 26 and 27). Other useful antibody formats include, but are not limited to, “mAb-Fv,” “mAb-scFv,” “central-Fv”, “one armed scFv-mAb,” “scFv-mAb,” “dual scFv,” and “trident” format antibodies, as disclosed in US20180127501A1, which is incorporated by reference herein, particularly in pertinent part relating to antibody formats (see, e.g., FIG. 2).

[0250] The -anti-CD28×anti-PD-L1 antibody can include any suitable CD28 ABD, including those described herein. In some embodiments, the CD28 ABD is an agonistic ABD that provides co-stimulatory function upon binding to CD28. In some embodiments, the anti-CD28×anti-TAA antibody includes a CD28 binding domain that includes the variable heavy domain and variable light of one of the following CD28 binding domains or variant thereof: 1A7[CD28]_H1L1, 1A7[CD28]_H1.14L1, 1A7[CD28]_L1H1.14, 1A7[CD28]_H1.1L1, 1A7[CD28]_H1L1.71, 1A7[CD28]_H1.14L1.71, 1A7[CD28]_L1.71H1.14, 1A7[CD28]_H1.1L1.71, HuTN228[CD28]_H1L1, CD28.3[CD28]_H0L0, hCD28.3[CD28]_H1L1, 5.11A1[CD28]_H0L0, TGN1412_H1L1, 341VL34[CD28]_H1L1, 341VL36[CD28]_H1L1, 281VL4[CD28]_H1L1, PV1[CD28]_H0L0, m9.3[CD28]_H0L0, and hu9.3[CD28]_H1L1 or a variant thereof (FIGS. 18-23 and the Sequence Listing).

[0251] The anti-CD28×anti-PD-L1 antibody provided herein can include one or more PD-L1 binding domains. In some embodiments, the anti-CD28×anti-PD-L1 antibody includes one PD-L1 binding domain. In certain embodiments, the anti-CD28×anti-PD-L1 antibody includes two PD-L1 binding domains.

[0252] Note that unless specified herein, the order of the antigen list in the name does not confer structure; that is an anti-PD-L1×anti-CD28 1+1 Fab-scFv-Fc antibody can have the scFv bind to PD-L1 or CD28, although in some cases, the order specifies structure as indicated.

[0253] In addition, in embodiments wherein the subject antibody includes an scFv, the scFv can be in an orientation from N- to C-terminus of VH-scFv linker-VL or VL-scFv linker-VH. In some formats, one or more of the ABDs generally is a Fab that includes a VH domain on one protein chain (generally as a component of a heavy chain) and a VL on another protein chain (generally as a component of a light chain).

[0254] As will be appreciated by those in the art, any set of 6 CDRs or VH and VL domains can be in the scFv format or in the Fab format, which is then added to the heavy and light constant domains, where the heavy constant domains comprise variants (including within the CH1 domain as well as the Fc domain). The scFv sequences contained in the sequence listing utilize a particular charged linker, but as outlined herein, uncharged or other charged linkers can be used, including those depicted in FIG. 6.

[0255] In addition, as discussed above, the numbering used in the Sequence Listing for the identification of the CDRs is Kabat, however, different numbering can be used, which will change the amino acid sequences of the CDRs as shown in Table 2.

[0256] For all of the variable heavy and light domains listed herein, further variants can be made. As outlined herein, in some embodiments the set of 6 CDRs can have from 0, 1, 2, 3, 4 or 5 amino acid modifications (with amino acid substitutions finding particular use), as well as changes in the framework regions of the variable heavy and light domains, as long as the frameworks (excluding the CDRs) retain at least about 80, 85 or 90% identity to a human germline sequence selected from those listed in FIG. 1 of U.S. Pat. No. 7,657,380, which Figure and Legend is incorporated by reference in its entirety herein. Thus, for example, the identical CDRs as described herein can be combined with different framework sequences from human germline sequences, as long as the framework regions retain at least 80, 85 or 90% identity to a human germline sequence selected from those listed in FIG. 1 of U.S. Pat. No. 7,657,380. Alternatively, the CDRs can have amino acid modifications (e.g., from 1, 2, 3, 4 or 5 amino acid modifications in the set of CDRs (that is, the CDRs can be modified as long as the total number of changes in the set of 6 CDRs is less than 6 amino acid modifications, with any combination of CDRs being changed; e.g., there may be one change in vlCDR1, two in vhCDR2, none in vhCDR3, etc.)), as well as having framework region changes, as long as the framework regions retain at least 80, 85 or 90% identity to a human germline sequence selected from those listed in FIG. 1 of U.S. Pat. No. 7,657,380.

### C. Heterodimeric Antibodies

[0257] In exemplary embodiments, the αPD-L1 antibodies provided herein are heterodimeric bispecific antibodies (e.g., αPD-L1×αCD28 heterodimeric bispecific antibodies) that include two variant Fc domain sequences. Such variant Fc domains include amino acid modifications to facilitate the self-assembly and/or purification of the heterodimeric antibodies.

[0258] An ongoing problem in antibody technologies is the desire for “bispecific” antibodies that bind to two different antigens simultaneously, in general thus allowing the different antigens to be brought into proximity and resulting in new functionalities and new therapies. In general, these antibodies are made by including genes for each heavy and light chain into the host cells. This generally results in the formation of the desired heterodimer (A-B), as well as the two homodimers (A-A and B-B (not including the light chain heterodimeric issues)). However, a major obstacle in the formation of bispecific antibodies is the difficulty in biasing the formation of the desired heterodimeric antibody over the formation of the homodimers and/or purifying the heterodimeric antibody away from the homodimers.

[0259] There are a number of mechanisms that can be used to generate the subject heterodimeric antibodies. In addition, as will be appreciated by those in the art, these different mechanisms can be combined to ensure high heterodimerization. Amino acid modifications that facilitate the production and purification of heterodimers are collectively referred to generally as “heterodimerization variants.” As discussed below, heterodimerization variants include “skew” variants (e.g., the “knobs and holes” and the “charge pairs” variants described below) as well as “pI variants,” which allow purification of heterodimers from homodimers. As is generally described in U.S. Pat. No. 9,605,084, hereby incorporated by reference in its entirety and specifically as below for the discussion of heterodimerization variants, useful mechanisms for heterodimerization include “knobs and holes” (“KIH”) as described in U.S. Pat. No. 9,605,084, “electrostatic steering” or “charge pairs” as described in U.S. Pat. No. 9,605,084, pI variants as described in U.S. Pat. No. 9,605,084, and general additional Fc variants as outlined in U.S. Pat. No. 9,605,084 and below.

[0260] Heterodimerization variants that are useful for the formation and purification of the subject heterodimeric antibody (e.g., bispecific antibodies) are further discussed in detailed below.

[0261] 1. Skew Variants

[0262] In some embodiments, the αPD-L1 heterodimeric antibody (e.g., αPD-L1×αCD28 heterodimeric antibody) includes skew variants which are one or more amino acid modifications in a first Fc domain (A) and/or a second Fc domain (B) that favor the formation of Fc heterodimers (Fc dimers that include the first and the second Fc domain; (A-B) over Fc homodimers (Fc dimers that include two of the first Fc domain or two of the second Fc domain; A-A or B-B). Suitable skew variants are included in the FIG. 29 of US Publ. App. No. 2016/0355608, hereby incorporated by reference in its entirety and specifically for its disclosure of skew variants, as well as in FIGS. 3, 8 and 9.

[0263] One particular type of skew variants is generally referred to in the art as “knobs and holes,” referring to amino acid engineering that creates steric influences to favor heterodimeric formation and disfavor homodimeric formation, as described in U.S. Ser. No. 61/596,846, Ridgway et al., Protein Engineering 9(7):617 (1996); Atwell et al., J. Mol. Biol. 1997 270:26; U.S. Pat. No. 8,216,805, all of which are hereby incorporated by reference in their entirety and specifically for the disclosure of “knobs and holes” mutations. This is sometime referred to herein as “steric variants.” The figures identify a number of “monomer A-monomer B” pairs that rely on “knobs and holes”. In addition, as described in Merchant et al., Nature Biotech. 16:677 (1998), these “knobs and holes” mutations can be combined with disulfide bonds to further favor formation of Fc heterodimers.

[0264] Another method that finds use in the generation of heterodimers is sometimes referred to as “electrostatic steering” as described in Gunasekaran et al., J. Biol. Chem. 285(25):19637 (2010), hereby incorporated by reference in its entirety. This is sometimes referred to herein as “charge pairs”. In this embodiment, electrostatics are used to skew the formation towards heterodimerization. As those in the art will appreciate, these may also have an effect on pI, and thus on purification, and thus could in some cases also be considered pI variants. However, as these were generated to force heterodimerization and were not used as purification tools, they are classified as “skew variants”. These include, but are not limited to, D221E/P228E/L368E paired with D221R/P228R/K409R (e.g., these are “monomer corresponding sets) and C220E/P228E/368E paired with C220R/E224R/P228R/K409R.

[0265] In some embodiments, the skew variants advantageously and simultaneously favor heterodimerization based on both the “knobs and holes” mechanism as well as the “electrostatic steering” mechanism. In some embodiments, the heterodimeric antibody includes one or more sets of such heterodimerization skew variants. These variants come in “pairs” of “sets”. That is, one set of the pair is incorporated into the first monomer and the other set of the pair is incorporated into the second monomer. It should be noted that these sets do not necessarily behave as “knobs in holes” variants, with a one-to-one correspondence between a residue on one monomer and a residue on the other. That is, these pairs of sets may instead form an interface between the two monomers that encourages heterodimer formation and discourages homodimer formation, allowing the percentage of heterodimers that spontaneously form under biological conditions to be over 90%, rather than the expected 50% (25% homodimer A/A:50% heterodimer A/B:25% homodimer B/B). Exemplary heterodimerization “skew” variants are depicted in FIGS. 3, 8, and 9. In exemplary embodiments, the heterodimeric antibody includes a S364K/E357Q: L368D/K370S; L368D/K370S: S364K; L368E/K370S: S364K; T411T/E360E/Q362E: D401K; L368D/K370S: S364K/E357L; K370S: S364K/E357Q; or a T366S/L368A/Y407V: T366W (optionally including a bridging disulfide, T366S/L368A/Y407V/Y349C: T366W/S354C) “skew” variant amino acid substitution set. In an exemplary embodiment, the heterodimeric antibody includes a “S364K/E357Q: L368D/K370S” amino acid substitution set. In terms of nomenclature, the pair “S364K/E357Q: L368D/K370S” means that one of the monomers includes an Fc domain that includes the amino acid substitutions S364K and E357Q and the other monomer includes an Fc domain that includes the amino acid substitutions L368D and K370S; as above, the “strandedness” of these pairs depends on the starting pI.

[0266] In some embodiments, the skew variants provided herein can be optionally and independently incorporated with any other modifications, including, but not limited to, other skew variants (see, e.g., in FIG. 37 of US Publ. App. No. 2012/0149876, herein incorporated by reference, particularly for its disclosure of skew variants), pI variants, isotpypic variants, FcRn variants, ablation variants, etc. into one or both of the first and second Fc domains of the heterodimeric antibody. Further, individual modifications can also independently and optionally be included or excluded from the subject the heterodimeric antibody.

[0267] In some embodiments, the skew variants outlined herein can be optionally and independently incorporated with any pI variant (or other variants such as Fc variants, FcRn variants, etc.) into one or both heavy chain monomers, and can be independently and optionally included or excluded from the subject heterodimeric antibodies.

[0268] 2. pI (Isoelectric Point) Variants for Heterodimers

[0269] In some embodiments, the αPD-L1 heterodimeric antibody (e.g., αPD-L1×αCD28 heterodimeric antibody) includes purification variants that advantageously allow for the separation of heterodimeric antibody from homodimeric proteins.

[0270] There are several basic mechanisms that can lead to ease of purifying heterodimeric antibodies. For example, modifications to one or both of the antibody heavy chain monomers A and B such that each monomer has a different pI allows for the isoelectric purification of heterodimeric A-B antibody from monomeric A-A and B-B proteins. Alternatively, some scaffold formats, such as the “1+1 Fab-scFv-Fc” format, the “2+1 Fab₂-scFv-Fc” format, and the “2+1 CLC” format allows separation on the basis of size. As described above, it is also possible to “skew” the formation of heterodimers over homodimers using skew variants. Thus, a combination of heterodimerization skew variants and pI variants find particular use in the heterodimeric antibodies provided herein.

[0271] Additionally, as more fully outlined below, depending on the format of the heterodimeric antibody, pI variants either contained within the constant region and/or Fc domains of a monomer, and/or domain linkers can be used. In some embodiments, the heterodimeric antibody includes additional modifications for alternative functionalities that can also create pI changes, such as Fc, FcRn and KO variants.

[0272] In some embodiments, the subject heterodimeric antibodies provided herein include at least one monomer with one or more modifications that alter the pI of the monomer (i.e., a “pI variant”). In general, as will be appreciated by those in the art, there are two general categories of pI variants: those that increase the pI of the protein (basic changes) and those that decrease the pI of the protein (acidic changes). As described herein, all combinations of these variants can be done: one monomer may be wild type, or a variant that does not display a significantly different pI from wild-type, and the other can be either more basic or more acidic. Alternatively, each monomer is changed, one to more basic and one to more acidic.

[0273] Depending on the format of the heterodimer antibody, pI variants can be either contained within the constant and/or Fc domains of a monomer, or charged linkers, either domain linkers or scFv linkers, can be used. That is, antibody formats that utilize scFv(s) such as “1+1 Fab-scFv-Fc”, format can include charged scFv linkers (either positive or negative), that give a further pI boost for purification purposes. As will be appreciated by those in the art, some 1+1 Fab-scFv-Fc and 2+1 Fab₂-scFv-Fc formats are useful with just charged scFv linkers and no additional pI adjustments, although the invention does provide pI variants that are on one or both of the monomers, and/or charged domain linkers as well. In addition, additional amino acid engineering for alternative functionalities may also confer pI changes, such as Fc, FcRn and KO variants.

[0274] In subject heterodimeric antibodies that utilizes pI as a separation mechanism to allow the purification of heterodimeric proteins, amino acid variants are introduced into one or both of the monomer polypeptides. That is, the pI of one of the monomers (referred to herein for simplicity as “monomer A”) can be engineered away from monomer B, or both monomer A and B change be changed, with the pI of monomer A increasing and the pI of monomer B decreasing. As is outlined more fully below, the pI changes of either or both monomers can be done by removing or adding a charged residue (e.g., a neutral amino acid is replaced by a positively or negatively charged amino acid residue, e.g., glycine to glutamic acid), changing a charged residue from positive or negative to the opposite charge (aspartic acid to lysine) or changing a charged residue to a neutral residue (e.g., loss of a charge; lysine to serine.). A number of these variants are shown in the FIGS. 3 and 4.

[0275] Thus, in some embodiments, the subject heterodimeric antibody includes amino acid modifications in the constant regions that alter the isoelectric point (pI) of at least one, if not both, of the monomers of a dimeric protein to form “pI antibodies”) by incorporating amino acid substitutions (“pI variants” or “pI substitutions”) into one or both of the monomers. As shown herein, the separation of the heterodimers from the two homodimers can be accomplished if the pIs of the two monomers differ by as little as 0.1 pH unit, with 0.2, 0.3, 0.4 and 0.5 or greater all finding use in the present invention.

[0276] As will be appreciated by those in the art, the number of pI variants to be included on each or both monomer(s) to get good separation will depend in part on the starting pI of the components, for example in the 1+1 Fab-scFv-Fc, 2+1 Fab₂-scFv-Fc, 1+1 CLC and 2+1 CLC formats, the starting pI of the scFv (1+1 Fab-scFv-Fc, 2+1 Fab₂-scFv-Fc) and Fab(s) of interest. That is, to determine which monomer to engineer or in which “direction” (e.g., more positive or more negative), the Fv sequences of the two target antigens are calculated and a decision is made from there. As is known in the art, different Fvs will have different starting pIs which are exploited in the present invention. In general, as outlined herein, the pIs are engineered to result in a total pI difference of each monomer of at least about 0.1 logs, with 0.2 to 0.5 being preferred as outlined herein.

[0277] In the case where pI variants are used to achieve heterodimerization, by using the constant region(s) of the heavy chain(s), a more modular approach to designing and purifying bispecific proteins, including antibodies, is provided. Thus, in some embodiments, heterodimerization variants (including skew and pI heterodimerization variants) are not included in the variable regions, such that each individual antibody must be engineered. In addition, in some embodiments, the possibility of immunogenicity resulting from the pI variants is significantly reduced by importing pI variants from different IgG isotypes such that pI is changed without introducing significant immunogenicity. Thus, an additional problem to be solved is the elucidation of low pI constant domains with high human sequence content, e.g., the minimization or avoidance of non-human residues at any particular position. Alternatively or in addition to isotypic substitutions, the possibility of immunogenicity resulting from the pI variants is significantly reduced by utilizing isosteric substitutions (e.g. Asn to Asp; and Gln to Glu).

[0278] As discussed below, a side benefit that can occur with this pI engineering is also the extension of serum half-life and increased FcRn binding. That is, as described in US Publ. App. No. US 2012/0028304 (incorporated by reference in its entirety), lowering the pI of antibody constant domains (including those found in antibodies and Fc fusions) can lead to longer serum retention in vivo. These pI variants for increased serum half-life also facilitate pI changes for purification.

[0279] In addition, it should be noted that the pI variants give an additional benefit for the analytics and quality control process of bispecific antibodies, as the ability to either eliminate, minimize and distinguish when homodimers are present is significant. Similarly, the ability to reliably test the reproducibility of the heterodimeric antibody production is important.

[0280] In general, embodiments of particular use rely on sets of variants that include skew variants, which encourage heterodimerization formation over homodimerization formation, coupled with pI variants, which increase the pI difference between the two monomers to facilitate purification of heterodimers away from homodimers.

[0281] Exemplary combinations of pI variants are shown in FIGS. 4 and 5, and FIG. 30 of US Publ. App. No. 2016/0355608, all of which are herein incorporated by reference in its entirety and specifically for the disclosure of pI variants. Preferred combinations of pI variants are shown in FIGS. 3 and 4. As outlined herein and shown in the figures, these changes are shown relative to IgG1, but all isotypes can be altered this way, as well as isotype hybrids. In the case where the heavy chain constant domain is from IgG2-4, R133E and R133Q can also be used.

[0282] In one embodiment, a preferred combination of pI variants has one monomer (the negative Fab side) comprising 208D/295E/384D/418E/421D variants (N208D/Q295E/N384D/Q418E/N421D when relative to human IgG1) and a second monomer (the positive scFv side) comprising a positively charged scFv linker, including (GKPGS)₄ (SEQ ID NO:892). However, as will be appreciated by those in the art, the first monomer includes a CH1 domain, including position 208. Accordingly, in constructs that do not include a CH1 domain (for example for antibodies that do not utilize a CH1 domain on one of the domains), a preferred negative pI variant Fc set includes 295E/384D/418E/421D variants (Q295E/N384D/Q418E/N421D when relative to human IgG1).

[0283] Accordingly, in some embodiments, one monomer has a set of substitutions from FIG. 4 and the other monomer has a charged linker (either in the form of a charged scFv linker because that monomer comprises an scFv or a charged domain linker, as the format dictates, which can be selected from those depicted in FIG. 6).

[0284] In some embodiments, modifications are made in the hinge of the Fc domain, including positions 216, 217, 218, 219, 220, 221, 222, 223, 224, 225, 226, 227, 228, 229, and 230 based on EU numbering. Thus, pI mutations and particularly substitutions can be made in one or more of positions 216-230, with 1, 2, 3, 4 or 5 mutations finding use. Again, all possible combinations are contemplated, alone or with other pI variants in other domains.

[0285] Specific substitutions that find use in lowering the pI of hinge domains include, but are not limited to, a deletion at position 221, a non-native valine or threonine at position 222, a deletion at position 223, a non-native glutamic acid at position 224, a deletion at position 225, a deletion at position 235 and a deletion or a non-native alanine at position 236. In some cases, only pI substitutions are done in the hinge domain, and in others, these substitution(s) are added to other pI variants in other domains in any combination.

[0286] In some embodiments, mutations can be made in the CH2 region, including positions 233, 234, 235, 236, 274, 296, 300, 309, 320, 322, 326, 327, 334 and 339, based on EU numbering. It should be noted that changes in 233-236 can be made to increase effector function (along with 327A) in the IgG2 backbone. Again, all possible combinations of these 14 positions can be made; e.g., an anti-CD28 or anti-PD-L1 antibody provided herein may include a variant Fc domain with 1, 2, 3, 4, 5, 6, 7, 8, 9 or 10 CH2 pI substitutions.

[0287] Specific substitutions that find use in lowering the pI of CH2 domains include, but are not limited to, a non-native glutamine or glutamic acid at position 274, a non-native phenylalanine at position 296, a non-native phenylalanine at position 300, a non-native valine at position 309, a non-native glutamic acid at position 320, a non-native glutamic acid at position 322, a non-native glutamic acid at position 326, a non-native glycine at position 327, a non-native glutamic acid at position 334, a non-native threonine at position 339, and all possible combinations within CH2 and with other domains.

[0288] In this embodiment, the modifications can be independently and optionally selected from position 355, 359, 362, 384, 389, 392, 397, 418, 419, 444 and 447 (EU numbering) of the CH3 region. Specific substitutions that find use in lowering the pI of CH3 domains include, but are not limited to, a non-native glutamine or glutamic acid at position 355, a non-native serine at position 384, a non-native asparagine or glutamic acid at position 392, a non-native methionine at position 397, a non-native glutamic acid at position 419, a non-native glutamic acid at position 359, a non-native glutamic acid at position 362, a non-native glutamic acid at position 389, a non-native glutamic acid at position 418, a non-native glutamic acid at position 444, and a deletion or non-native aspartic acid at position 447.

[0289] 3. Isotypic Variants

[0290] In addition, many embodiments of the subject heterodimeric antibodies rely on the “importation” of pI amino acids at particular positions from one IgG isotype into another, thus reducing or eliminating the possibility of unwanted immunogenicity being introduced into the variants. A number of these are shown in FIG. 21 of US Publ. 2014/0370013, hereby incorporated by reference. That is, IgG1 is a common isotype for therapeutic antibodies for a variety of reasons, including high effector function. However, the heavy constant region of IgG1 has a higher pI than that of IgG2 (8.10 versus 7.31). By introducing IgG2 residues at particular positions into the IgG1 backbone, the pI of the resulting monomer is lowered (or increased) and additionally exhibits longer serum half-life. For example, IgG1 has a glycine (pI 5.97) at position 137, and IgG2 has a glutamic acid (pI 3.22); importing the glutamic acid will affect the pI of the resulting protein. As is described below, a number of amino acid substitutions are generally required to significant affect the pI of the variant antibody. However, it should be noted as discussed below that even changes in IgG2 molecules allow for increased serum half-life.

[0291] In other embodiments, non-isotypic amino acid changes are made, either to reduce the overall charge state of the resulting protein (e.g., by changing a higher pI amino acid to a lower pI amino acid), or to allow accommodations in structure for stability, etc. as is more further described below.

[0292] In addition, by pI engineering both the heavy and light constant domains, significant changes in each monomer of the heterodimer can be seen. As discussed herein, having the pIs of the two monomers differ by at least 0.5 can allow separation by ion exchange chromatography or isoelectric focusing, or other methods sensitive to isoelectric point.

[0293] 4. Calculating pI

[0294] The pI of each monomer of the antibodies provided herein can depend on the pI of the variant heavy chain constant domain and the pI of the total monomer, including the variant heavy chain constant domain and the fusion partner. Thus, in some embodiments, the change in pI is calculated on the basis of the variant heavy chain constant domain, using the chart in the FIG. 19 of US Pub. 2014/0370013. As discussed herein, which monomer to engineer is generally decided by the inherent pI of the Fv and scaffold regions. Alternatively, the pI of each monomer can be compared.

[0295] 5. pI Variants that Also Confer Better FcRn In Vivo Binding

[0296] In the case where the pI variant decreases the pI of the monomer, the pI variant can have the added benefit of improving serum retention in vivo.

[0297] Although still under examination, Fc regions are believed to have longer half-lives in vivo, because binding to FcRn at pH 6 in an endosome sequesters the Fc (Ghetie and Ward, 1997 Immunol Today. 18(12): 592-598, entirely incorporated by reference). The endosomal compartment then recycles the Fc to the cell surface. Once the compartment opens to the extracellular space, the higher pH, ˜7.4, induces the release of Fc back into the blood. In mice, Dall' Acqua et al. showed that Fc mutants with increased FcRn binding at pH 6 and pH 7.4 actually had reduced serum concentrations and the same half-life as wild-type Fc (Dall' Acqua et al. 2002, J. Immunol. 169:5171-5180, entirely incorporated by reference). The increased affinity of Fc for FcRn at pH 7.4 is thought to forbid the release of the Fc back into the blood. Therefore, the Fc mutations that will increase Fc's half-life in vivo will ideally increase FcRn binding at the lower pH while still allowing release of Fc at higher pH. The amino acid histidine changes its charge state in the pH range of 6.0 to 7.4. Therefore, it is not surprising to find His residues at important positions in the Fc/FcRn complex.

[0298] Recently it has been suggested that antibodies with variable regions that have lower isoelectric points may also have longer serum half-lives (Igawa et al., 2010 PEDS. 23(5): 385-392, entirely incorporated by reference). However, the mechanism of this is still poorly understood. Moreover, variable regions differ from antibody to antibody. Constant region variants with reduced pI and extended half-life would provide a more modular approach to improving the pharmacokinetic properties of antibodies, as described herein.

### D. Additional Fc Variants for Additional Functionality

[0299] In addition to the heterodimerization variants discussed above, there are a number of useful Fc amino acid modification that can be made for a variety of reasons, including, but not limited to, altering binding to one or more FcγR receptors, altered binding to FcRn receptors, etc., as discussed below.

[0300] Accordingly, the antibodies provided herein (heterodimeric, as well as homodimeric) can include such amino acid modifications with or without the heterodimerization variants outlined herein (e.g., the pI variants and steric variants). Each set of variants can be independently and optionally included or excluded from any particular heterodimeric protein.

[0301] 1. FcγR Variants

[0302] Accordingly, there are a number of useful Fc substitutions that can be made to alter binding to one or more of the FcγR receptors. In certain embodiments, the subject antibody includes modifications that alter the binding to one or more FcγR receptors (i.e., “FcγR variants”). Substitutions that result in increased binding as well as decreased binding can be useful. For example, it is known that increased binding to FcγRIIIa generally results in increased ADCC (antibody dependent cell-mediated cytotoxicity; the cell-mediated reaction wherein nonspecific cytotoxic cells that express FcγRs recognize bound antibody on a target cell and subsequently cause lysis of the target cell). Similarly, decreased binding to FcγRIIb (an inhibitory receptor) can be beneficial as well in some circumstances. Amino acid substitutions that find use in the subject antibodies include those listed in U.S. Pat. No. 8,188,321 (particularly FIG. 41) and U.S. Pat. No. 8,084,582, and US Publ. App. Nos. 20060235208 and 20070148170, all of which are expressly incorporated herein by reference in their entirety and specifically for the variants disclosed therein that affect Fcγ receptor binding. Particular variants that find use include, but are not limited to, 236A, 239D, 239E, 332E, 332D, 239D/332E, 267D, 267E, 328F, 267E/328F, 236A/332E, 239D/332E/330Y, 239D, 332E/330L, 243A, 243L, 264A, 264V and 299T. Such modification may be included in one or both Fc domains of the subject antibody.

[0303] In some embodiments, the subject antibody includes one or more Fc modifications that increase serum half-life. Fc substitutions that find use in increased binding to the FcRn receptor and increased serum half-life, as specifically disclosed in U.S. Ser. No. 12/341,769, hereby incorporated by reference in its entirety, including, but not limited to, 434S, 434A, 428L, 308F, 259I, 428L/434S, 259I/308F, 436I/428L, 436I or V/434S, 436V/428L and 259I/308F/428L. Such modification may be included in one or both Fc domains of the subject antibody.

[0304] 2. Ablation Variants

[0305] In some embodiments, the heterodimeric antibody (e.g., anti-PD-L1×anti-CD28 bispecific antibody) includes one or more modifications that reduce or remove the normal binding of the Fc domain to one or more or all of the Fcγ receptors (e.g., FcγR1, FcγRIIa, FcγRIIb, FcγRIIIa, etc.) to avoid additional mechanisms of action. Such modifications are referred to as “FcγR ablation variants” or “Fc knock out (FcKO or KO)” variants. In these embodiments, for some therapeutic applications, it is desirable to reduce or remove the normal binding of the Fc domain to one or more or all of the Fcγ receptors (e.g., FcγR1, FcγRIIa, FcγRIIb, FcγRIIIa, etc.) to avoid additional mechanisms of action. That is, for example, in many embodiments, particularly in the use of bispecific antibodies that bind CD28 monovalently, it is generally desirable to ablate FcγRIIIa binding to eliminate or significantly reduce ADCC activity. In some embodiments, of the subject antibodies described herein, at least one of the Fc domains comprises one or more Fcγ receptor ablation variants. In some embodiments, of the subject antibodies described herein, both of the Fc domains comprises one or more Fcγ receptor ablation variants. These ablation variants are depicted in FIG. 5, and each can be independently and optionally included or excluded, with preferred aspects utilizing ablation variants selected from the group consisting of G236R/L328R, E233P/L234V/L235A/G236del/S239K, E233P/L234V/L235A/G236del/S267K, E233P/L234V/L235A/G236del/S239K/A327G, E233P/L234V/L235A/G236del/S267K/A327G and E233P/L234V/L235A/G236del. It should be noted that the ablation variants referenced herein ablate FcγR binding but generally not FcRn binding.

[0306] As is known in the art, the Fc domain of human IgG1 has the highest binding to the Fcγ receptors, and thus ablation variants can be used when the constant domain (or Fc domain) in the backbone of the heterodimeric antibody is IgG1. Alternatively, or in addition to ablation variants in an IgG1 background, mutations at the glycosylation position 297 (generally to A or S) can significantly ablate binding to FcγRIIIa, for example. Human IgG2 and IgG4 have naturally reduced binding to the Fcγ receptors, and thus those backbones can be used with or without the ablation variants.

### E. Combination of Heterodimeric and Fc Variants

[0307] As will be appreciated by those in the art, all of the recited heterodimerization variants (including skew and/or pI variants) can be optionally and independently combined in any way, as long as they retain their “strandedness” or “monomer partition”. In addition, all of these variants can be combined into any of the heterodimerization formats.

[0308] In the case of pI variants, while embodiments finding particular use are shown in the figures, other combinations can be generated, following the basic rule of altering the pI difference between two monomers to facilitate purification.

[0309] In addition, any of the heterodimerization variants, skew and pI, are also independently and optionally combined with Fc ablation variants, Fc variants, FcRn variants, as generally outlined herein.

[0310] Exemplary combination of variants that are included in some embodiments of the heterodimeric 1+1 Fab-scFv-Fc, 2+1 Fab₂-scFv-Fc, 2+1 mAb-scFv, 1+1 CLC and 2+1 CLC format antibodies are included in FIG. 8. In some embodiments, the heterodimeric antibody includes a combination of variants as depicted in FIG. 8. In certain embodiments, the antibody is a heterodimeric 1+1 Fab-scFv-Fc, 2+1 Fab₂-scFv-Fc, +1 mAb-scFv, 1+1 CLC or 2+1 CLC format antibody.

### F. Useful Antibody Formats

[0311] As will be appreciated by those in the art and discussed more fully below, the heterodimeric bispecific antibodies provided herein can take on several different configurations as generally depicted in FIG. 21.

[0312] As will be appreciated by those in the art, the heterodimeric formats of the invention can have different valencies as well as be bispecific. That is, heterodimeric antibodies of the invention can be bivalent and bispecific, or trivalent and bispecific, wherein the first antigen is bound by two binding domains and the second antigen by a second binding domain.

[0313] In some embodiments, the present invention utilizes PD-L1 antigen binding domains. Any of the anti-PD-L1 antigen binding domains can be used, whether CDRs, variable light and variable heavy domains, Fabs and scFvs as depicted herein, including in any of the Figures (e.g., FIGS. 28-31) and the Sequence Listing, can be used, optionally and independently combined in any combination.

[0314] In some embodiments, the present invention utilizes CD28 antigen binding domains in combination with PD-L1 binding domains. As is outlined herein, when CD28 is one of the target antigens, it is preferable that the CD28 is bound only monovalently. As will be appreciated by those in the art, any collection of anti-CD28 CDRs, anti-CD28 variable light and variable heavy domains, Fabs and scFvs as depicted herein, including in any of the Figures (see particularly FIGS. 18-23) and the Sequence Listing, can be used.

[0315] 1. 1+1 Fab-scFv-Fc format (“Bottle Opener”)

[0316] One heterodimeric antibody format that finds particular use in subject bispecific antibodies provided herein (e.g., anti-CD28×anti-PD-L1 antibody) is the “1+1 Fab-scFv-Fc” or “bottle opener” format as shown in FIG. 26A. The 1+1 Fab-scFv-Fc format antibody includes a first monomer that is a “regular” heavy chain (VH1-CH1-hinge-CH2-CH3), wherein VH1 is a first variable heavy domain and CH2-CH3 is a first Fc domain. The 1+1 Fab-scFv-Fc also includes a light chain that includes a first variable light domain VL1 and a constant light domain CL. The light chain interacts with the VH1-CH1 of the first monomer to form a first antigen binding domain that is a Fab. The second monomer of the antibody includes a second binding domain that is a single chain Fv (“scFv”, as defined below) and a second Fc domain. The scFv includes a second variable heavy domain (VH2) and a second variable light domain (VL2), wherein the VH2 is attached to the VL2 using an scFv linker that can be charged (see, e.g., FIG. 6). The scFv is attached to the heavy chain using a domain linker (see, e.g., FIG. 7). The two monomers are brought together by the use of amino acid variants (e.g., heterodimerization variants, discussed above) in the constant regions (e.g., the Fc domain, the CH1 domain and/or the hinge region) that promote the formation of heterodimeric antibodies as is described more fully below. This structure is sometimes referred to herein as the “bottle-opener” format, due to a rough visual similarity to a bottle-opener. In some embodiments, the 1+1 Fab-scFv-Fc format antibody is a bivalent antibody.

[0317] There are several distinct advantages to the present “1+1 Fab-scFv-Fc” format. As is known in the art, antibody analogs relying on two scFv constructs often have stability and aggregation problems, which can be alleviated in the present invention by the addition of a “regular” heavy and light chain pairing. In addition, as opposed to formats that rely on two heavy chains and two light chains, there is no issue with the incorrect pairing of heavy and light chains (e.g., heavy 1 pairing with light 2, etc.).

[0318] In some embodiments of the 1+1 Fab-scFv-Fc format antibody, one of the first or second antigen binding domain is a PD-L1 binding domain. In some embodiments, the first binding domain (i.e., the Fab) is a PD-L1 binding domain. In certain embodiments, the second binding domain (i.e., the scFv) is the PD-L1 binding domain. Any suitable PD-L1 binding domain can be included in the subject antibody including those provided herein (FIGS. 28-31 and the Sequence Listing).

[0319] In some embodiments, the PD-L1 binding domain is one of the following PD-L1 binding domains or a variant thereof: 2G4[PDL1]_H1L1, 2G4[PDL1]_H1.12_L1.24, 2G4[PDL1]_H1.12_L1.66, 2G4[PDL1]_H1.12_L1.68, 2G4[PDL1]_H1.12_L1.14, 2G4[PDL1]_H1.4_L1.23, 2G4[PDL1]_H1.4_L1.24, 2G4[PDL1]_H1.9_L1, 2G4[PDL1]_H1.62_L1.63, 2G4[PDL1]_H1.6_L1.3, 2G4[PDL1]_H1.61_L1.61, 2G4[PDL1]_H1.60_L1.60, 2G4[PDL1]_H1.59_L1.60, 2G4[PDL1]_H1.14_L1.26, 2G4[PDL1]_H1_L1.27, 2G4[PDL1]_H1.8_L1.26, 2G4[PDL1]_H1_L1.25, 2G4[PDL1]_H1.10_L1.23, 2G4[PDL1]_H1.1_L1.1, 2G4[PDL1]_H1_L1.29 (FIGS. 28-31 and the Sequence Listing).

[0320] In some embodiments of the 1+1 Fab-scFv-Fc format, the PD-L1 binding domain has a variable heavy domain (VH) selected from the group consisting of: SEQ ID NO:1079, SEQ ID NO:1042, SEQ ID NO:1055, SEQ ID NO:1059, SEQ ID NO:1063, SEQ ID NO: 1067, SEQ ID NO: 1071, SEQ ID NO: 1075, SEQ ID NO:1083, SEQ ID NO:1087, SEQ ID NO:1091, SEQ ID NO:1095, SEQ ID NO:1099, and SEQ ID NOs:736-797 or a variant thereof, and a variable light domain (VL) selected from the group consisting of: SEQ ID NO: 1111, SEQ ID NO:1046, SEQ ID NO:1103, SEQ ID NO:1107, SEQ ID NO:1115, SEQ ID NO:1119, SEQ ID NO:1123, SEQ ID NO:1127, SEQ ID NO:1131, SEQ ID NO:1135, SEQ ID NO:1139, SEQ ID NO:1143, SEQ ID NO:1147, SEQ ID NO:1151, SEQ ID NO:1155, and SEQ ID NOS:798-868 or a variant thereof.

[0321] In some embodiments, the VH and VL of the PD-L1 binding domain are selected from the group consisting of: a VH having an amino acid sequence of SEQ ID NO: 1183 and a VL having an amino acid sequence of SEQ ID NO:1187; a VH having an amino acid of SEQ ID NO:1042 and a VL having an amino acid sequence of SEQ ID NO:1047; a VH having an amino acid sequence of SEQ ID NO: 1159 and a VL having an amino acid sequence of SEQ ID NO: 1163; a VH having an amino acid sequence of SEQ ID NO: 1167 and a VL having an amino acid sequence of SEQ ID NO:1171; a VH having an amino acid sequence of SEQ ID NO: 1175 and a VL having an amino acid sequence of SEQ ID NO: 1179; a VH having an amino acid sequence of SEQ ID NO: 1191 and a VL having an amino acid sequence of SEQ ID NO: 1195; a VH having an amino acid sequence of SEQ ID NO:1199 and a VL having an amino acid sequence of SEQ ID NO:1203; a VH having an amino acid sequence of SEQ ID NO:1207 and a VL having an amino acid sequence of SEQ ID NO:1211; a VH having an amino acid sequence of SEQ ID NO:1215 and a VL having an amino acid sequence of SEQ ID NO:1219; a VH having an amino acid sequence of SEQ ID NO:1223 and a VL having an amino acid sequence of SEQ ID NO:1227; a VH having an amino acid sequence of SEQ ID NO:1231 and a VL having an amino acid sequence of SEQ ID NO:1235; a VH having an amino acid sequence of SEQ ID NO:1239 and a VL having an amino acid sequence of SEQ ID NO:1243; a VH having an amino acid sequence of SEQ ID NO:1247 and a VL having an amino acid sequence of SEQ ID NO:1251; a VH having an amino acid sequence of SEQ ID NO:1255 and a VL having an amino acid sequence of SEQ ID NO:1259; a VH having an amino acid sequence of SEQ ID NO:1263 and a VL having an amino acid sequence of SEQ ID NO:1267; a VH having an amino acid sequence of SEQ ID NO:1271 and a VL having an amino acid sequence of SEQ ID NO:1275; a VH having an amino acid sequence of SEQ ID NO:1279 and a VL having an amino acid sequence of SEQ ID NO:1283; a VH having an amino acid sequence of SEQ ID NO:1287 and a VL having an amino acid sequence of SEQ ID NO:1291; a VH having an amino acid sequence of SEQ ID NO:1295 and a VL having an amino acid sequence of SEQ ID NO:1299; and a VH having an amino acid sequence of SEQ ID NO:1303 and a VL having an amino acid sequence of SEQ ID NO:1307.

[0322] In some embodiments, the PD-L1 binding domain is selected from one of the following PD-L1 binding domains: 2.14H9 OPT, atezolizumab, avelumab, 12A4, 3G10, 10A5, h3D10 Var1, h3D10 Var2, h3D10 Var3, h3D10 Var4, h3D10 Var5, h3D10 Var6, h3D10 Var7, h3D10 Var8, h3D10 Var9, h3D10 Var10, h3D10 Var11, h3D10 Var12, h3D10 Var13, h3D10 Var14, Antibody A, C5H9v2, Humanized 29E.2A3, 1B9, 4H1, mAb-42, BAP058-03, BAP058-04, BAP058-06, BAP058-07, BAP058-11, BAP058-13, H6, RC5, SH1A1Q, SH1B3, SH1D1, SH1D2, SH1D12, SH1E1, SH1G9, SH1E6, SH1A2, SH1B1, H6B1L, H6A1, H6B1, H6B2, G12, RSA1, RA3, SH1E2, SH1E4, SH1B11, SH1C8, H1H9364P2, H1H9373P2, H1H8314N, PDL1.3.1 or a variant thereof.

[0323] In some embodiments, the VH and VL of the PD-L1 binding domain is selected from the following VH and VLs, respectively: SEQ ID NOs:89 and 93, SEQ ID NOs:97 and 101, SEQ ID NOs:105 and 109, SEQ ID NOs:113 and 117, SEQ ID NOs:121 and 125, SEQ ID NOs:129 and 133, SEQ ID NOs:137 and 141, SEQ ID NOs:145 and 149, SEQ ID NOs:153 and 157, SEQ ID NOs:161 and 165, SEQ ID NOs:169 and 173, SEQ ID NOs:177 and 181, SEQ ID NOs:185 and 189, SEQ ID NOs:193 and 197, SEQ ID NOs:201 and 205, SEQ ID NOs:209 and 213, SEQ ID NOs:217 and 221, SEQ ID NOs:225 and 229, SEQ ID NOs:233 and 237, SEQ ID NOs:241 and 245, SEQ ID NOs:249 and 253, SEQ ID NOs:257 and 261, SEQ ID NOs:265 and 269, SEQ ID NOs:273 and 277, SEQ ID NOs:281 and 285, SEQ ID NOs:289 and 293, SEQ ID NOs:297 and 301, SEQ ID NOs:305 and 309, SEQ ID NOs:313 and 317, SEQ ID NOs:321 and 325, SEQ ID NOs:329 and 333, SEQ ID NOs:337 and 341, SEQ ID NOs:345 and 349, SEQ ID NOs:353 and 357, SEQ ID NOs:361 and 365, SEQ ID NOs:369 and 373, SEQ ID NOs:374 and 381, SEQ ID NOs:385 and 389, SEQ ID NOs:393 and 397, SEQ ID NOs:401 and 405, SEQ ID NOs:409 and 413, SEQ ID NOs:417 and 421, SEQ ID NOs:425 and 429, SEQ ID NOs:433 and 437, SEQ ID NOs:441 and 445, SEQ ID NOs:449 and 453, SEQ ID NOs:457 and 461, SEQ ID NOs:465 and 469, SEQ ID NOs:473 and 477, SEQ ID NOs:481 and 485, SEQ ID NOs:489 and 493, SEQ ID NOs:497 and 501, SEQ ID NOs:504 and 508, SEQ ID NOs:512 and 516, SEQ ID NOs:520 and 524, SEQ ID NOs:528 and 534, SEQ ID NOs:537 and 541, SEQ ID NOs:545 and 549, SEQ ID NOs:553 and 557 or variants thereof.

[0324] In some embodiments of the 1+1 Fab-scFv-Fc format antibody, one of the first or second antigen binding domain is a CD28 binding domain and the other binding domain is a PD-L1 binding domain. In some embodiments where the 1+1 Fab-scFv-Fc includes a CD28 binding domain and a PD-L1 binding domain, it is the scFv that binds to the CD28, and the Fab that binds PD-L1. Exemplary anti-PD-L1×anti-CD28 bispecific antibody in the 1+1 Fab-scFv-Fc format is depicted in FIG. 35. In some embodiments, the anti-PD-L1×anti-CD28 bispecific antibody is an antibody depicted in FIG. 35.

[0325] In some embodiments, the first and second Fc domains of the 1+1 Fab-scFv-Fc format antibody are variant Fc domains that include heterodimerization skew variants (e.g., a set of amino acid substitutions as shown in FIGS. 3 and 8). Particularly useful heterodimerization skew variants include S364K/E357Q: L368D/K370S; L368D/K370S: S364K; L368E/K370S S364K; T411T/E360E/Q362E: D401K; L368D/K370S: S364K/E357L; K370S: S364K/E357Q; T366S/L368A/Y407V: T366W and T366S/L368A/Y407V/Y349C: T366W/S354C (EU numbering)). In exemplary embodiments, one of the first or second variant Fc domains includes heterodimerization skew variants L368D/K370S and the other of the first or second variant Fc domains includes heterodimerization skew variants S364K/E357Q, wherein numbering is according to EU numbering. In exemplary embodiments, the first variant Fc domain includes heterodimerization skew variants L368D/K370S and the second variant Fc domain includes heterodimerization skew variants S364K/E357Q, wherein numbering is according to EU numbering.

[0326] In some embodiments, the variant Fc domains include ablation variants (including those shown in FIG. 5). In some embodiments, each of the first and second variant Fc domains include ablation variants E233P/L234V/L235A/G236_/S267K, wherein numbering is according to EU numbering.

[0327] In some embodiments, the constant domain (CH1-hinge-CH2-CH3) of the first monomer includes pI variants (including those shown in FIG. 4). In exemplary embodiments, the constant domain (CH1-hinge-CH2-CH3) of the first monomer includes pI variants N208D/Q295E/N384D/Q418E/N421D, wherein numbering is according to EU numbering.

[0328] In exemplary embodiments, the CH1-hinge-CH2-CH3 of the first monomer comprises amino acid variants L368D/K370S/N208D/Q295E/N384D/Q418E/N421D/E233P/L234V/L235A/G236del/S267K, the second Fc domain comprises amino acid variants S364K/E357Q/E233P/L234V/L235A/G236del/S267K, wherein numbering is according to EU numbering.

[0329] In some embodiments, the scFv of the 1+1 Fab-scFv-Fc format antibody provided herein includes a charged scFv linker (including those shown in FIG. 6). In some embodiments, the 1+1 Fab-scFv-Fc format antibody provided herein includes FcRn variants M428L/N434S, wherein numbering is according to EU numbering.

[0330] In exemplary embodiments, the first variant Fc domain includes heterodimerization skew variants L368D/K370S and the second variant Fc domain includes heterodimerization skew variants S364K/E357Q; each of the first and second variant Fc domains include ablation variants E233P/L234V/L235A/G236_/S267K; and the constant domain (CH1-hinge-CH2-CH3) of the first monomer includes pI variants N208D/Q295E/N384D/Q418E/N421D, wherein numbering is according to EU numbering. In some embodiments, the scFv of the 1+1 Fab-scFv-Fc format antibody provided herein includes a (GKPGS)₄ charged scFv linker. In some embodiments, the 1+1 Fab-scFv-Fc format antibody provided herein includes FcRn variants M428L/N434S, wherein numbering is according to EU numbering.

[0331] In some embodiments, one of the first binding domain or the second binding domain binds CD28 and the other binding domain binds PD-L1. In some embodiments of the 1+1 Fab-scFv-Fc format antibody, the first antigen binding domain (i.e., the Fab binding domain) binds PD-L1 and the second antigen binding domain (i.e., the scFv) binds CD28. In some embodiments of the 1+1 Fab-scFv-Fc format antibody, the first antigen binding domain binds CD28 (i.e., the Fab binding domain) and the second antigen binding domain (i.e., the scFv) binds PD-L1.

[0332] Any suitable CD28 binding domain can be included in subject 1+1 Fab-scFv-Fc format antibody, including any of the CD28 binding domains provided herein (see FIGS. 18-23 and the Sequence listing). In some embodiments, the CD28 binding domain is one of the following CD28 binding domains or a variant thereof: 1A7[CD28]_H1L1, 1A7[CD28]_H1.14L1, 1A7[CD28]_L1H1.14, 1A7[CD28]_H1.1L1, 1A7[CD28]_H1L1.71, IA7[CD28]_H1.14L1.71, 1A7[CD28]_L1.71H1.14, 1A7[CD28]_H1.1L1.71, HuTN228[CD28]_H1L1, CD28.3[CD28]_H0L0, hCD28.3[CD28]_H1L1, 5.11A1[CD28]_H0L0, TGN1412_H1L1, 341VL34[CD28]_H1L1, 341VL36[CD28]_H1L1, 281VL4[CD28]_H1L1, PV1[CD28]_H0L0, m9.3[CD28]_H0L0, and hu9.3[CD28]_H1L1 or a variant thereof (FIGS. 18-23 and the Sequence Listing).

[0333] In some embodiments of the 1+1 Fab-scFv-Fc format, the CD28 binding domain has a variable heavy domain (VH) selected from the group consisting of: SEQ ID NO:998, SEQ ID NO:984, SEQ ID NO:994 and SEQ ID NOs:561-629 or a variant thereof, and a variable light domain (VL) selected from the group consisting of: SEQ ID NO:1002, SEQ ID NO:984, and SEQ ID NOs:630-735 or a variant thereof. In some embodiments, the VH and VL of the CD28 binding domain are selected from the group consisting of: a VH having an amino acid sequence of SEQ ID NO:1030 and a VL having an amino acid sequence of SEQ ID NO:1034; a VH having an amino acid sequence of SEQ ID NO:1006 and a VL having an amino acid sequence of SEQ ID NO:1010; a VH having an amino acid sequence of SEQ ID NO:1014 and a VL having an amino acid sequence of SEQ ID NO:1018; and a VH having an amino acid sequence of SEQ ID NO:1022 and a VL having an amino acid sequence of SEQ ID NO:1026.

[0334] In exemplary embodiments, the CD28 binding domain includes a 1A7[CD28]_H1.14 variable heavy domain. In some embodiments, the CD28 binding domain includes a 1A7[CD28]_H1.14 variable heavy domain or variant thereof and a light variable domain of any of the CD28 binding domains provided herein. In exemplary embodiments, the CD28 binding domain is 1A7[CD28]_H1.14L1.71 or a variant thereof.

[0335] In some embodiments, the CD28 binding domain is selected from one of the following CD28 binding domains: CD28.3[CD28]_H0L0, hCD28.3[CD28]_H1L1, 5.11A1[CD28]_H0L0, TGN1412_H1L1, 341VL34[CD28]_H1L1, 341VL36[CD28]_H1L1, 281VL4[CD28]_H1L1, HuTN228[CD28]_H1L1, PV1[CD28]_H0L0, m9.3[CD28]_H0L0, hu9.3[CD28]_H1L1 or a variant thereof.

[0336] In some embodiments, the VH and VL of the CD28 binding domain is selected from the following VH and VLs, respectively: SEQ ID NOs:1 and 5, SEQ ID NOs:9 and 13, SEQ ID NOs:17 and 21, SEQ ID NOs:25 and 29, SEQ ID NOs:33 and 37, SEQ ID NOs:41 and 46, SEQ ID NOs:49 and 53, SEQ ID NOs:57 and 61, SEQ ID NOs:65 and 69, SEQ ID NOs:73 and 77, and SEQ ID NOs:81 and 85. or variants thereof.

[0337] Any suitable PD-L1 binding domain can be included in subject anti-CD28×anti-PD-L11+1 Fab-scFv-Fc format antibody, including any of the PD-L1 binding domains provided herein (see, e.g., FIGS. 28-31 and the Sequence Listing). In exemplary embodiments, the PD-L1 binding domain has a VH with an amino acid sequence of SEQ ID NO:1183 and a VL with an amino acid sequence of SEQ ID NO:1187. In exemplary embodiments, the PD-L1 binding domain has a VH with an amino acid sequence of SEQ ID NO:1042 and a VL with an amino acid sequence of SEQ ID NO:1046. In exemplary embodiments, the PD-L1 binding domain has a VH with an amino acid sequence of SEQ ID NO:1159 and a VL with an amino acid sequence of SEQ ID NO:1163.

[0338] FIG. 10 shows some exemplary Fc domain sequences that are useful in the 1+1 Fab-scFv-Fc format antibodies. The “monomer 1” sequences depicted in FIG. 10 typically refer to the Fc domain of the “Fab-Fc heavy chain” and the “monomer 2” sequences refer to the Fc domain of the “scFv-Fc heavy chain.” In addition, FIGS. 12-15 provides exemplary CH1-hinge domains, CH1 domains, and hinge domains that can be included in the first or second monomer of the 1+1 Fab-scFv-Fc format. Further, FIG. 16 provides useful CL sequences that can be used with this format. 2. 2+1 Fab₂-scFv-Fc format (Central-scFv format)

[0339] One heterodimeric antibody format that finds particular use in the subject bispecific antibodies provided herein (e.g., anti-PD-L1×anti-CD28×antibody) is the 2+1 Fab2-scFv-Fc format (also referred to as “central-scFv format”) shown in FIG. 26B. This antibody format includes three antigen binding domains: two Fab portions and an scFv that is inserted between the VH-CH1 and CH2-CH3 regions of one of the monomers. In some embodiments of this format, the two Fab portions each bind PD-L1. In some embodiments, the “extra” scFv domain binds CD28. In some embodiments, the 2+1 Fab₂-scFv-Fc format antibody is a trivalent antibody.

[0340] In some embodiments of the 2+1 Fab₂-scFv-Fc format, a first monomer includes a standard heavy chain (i.e., VH1-CH1-hinge-CH2-CH3), wherein VH1 is a first variable heavy domain and CH2-CH3 is a first Fc domain. A second monomer includes another first variable heavy domain (VH1), a CH1 domain (and optional hinge), a second Fc domain, and an scFv that includes an scFv variable light domain (VL2), an scFv linker and a scFv variable heavy domain (VH2). The scFv is covalently attached between the C-terminus of the CH1 domain of the second monomer and the N-terminus of the second Fc domain using optional domain linkers (VH1-CH1-[optional linker]-VH2-scFv linker-VH2-[optional linker]-CH2-CH3, or the opposite orientation for the scFv, VH1-CH1-[optional linker]-VL2-scFv linker-VH2-[optional linker]-CH2-CH3). The optional linkers can be any suitable peptide linkers, including, for example, the domain linkers included in FIG. 7. This embodiment further utilizes a common light chain that includes a variable light domain (VL1) and a constant light domain (CL). The common light chain associates with the VH1-CH1 of the first and second monomers to form two identical Fabs. In some embodiments, the identical Fabs each bind PD-L1. As for many of the embodiments herein, these constructs can include skew variants, pI variants, ablation variants, additional Fc variants, etc. as desired and described herein.

[0341] In some embodiments, the first and second Fc domains of the 2+1 Fab₂-scFv-Fc format antibody are variant Fc domains that include heterodimerization skew variants (e.g., a set of amino acid substitutions as shown in FIGS. 3 and 8). Particularly useful heterodimerization skew variants include S364K/E357Q: L368D/K370S; L368D/K370S: S364K; L368E/K370S S364K; T411T/E360E/Q362E: D401K; L368D/K370S: S364K/E357L; K370S: S364K/E357Q; T366S/L368A/Y407V: T366W and T366S/L368A/Y407V/Y349C: T366W/S354C (EU numbering)). In exemplary embodiments, one of the first or second variant Fc domains includes heterodimerization skew variants L368D/K370S and the other of the first or second variant Fc domains includes heterodimerization skew variants S364K/E357Q, wherein numbering is according to EU numbering. In exemplary embodiments, the first variant Fc domain includes heterodimerization skew variants L368D/K370S and the second variant Fc domain includes heterodimerization skew variants S364K/E357Q, wherein numbering is according to EU numbering.

[0342] In some embodiments, the variant Fc domains include ablation variants (including those shown in FIG. 5). In some embodiments, each of the first and second variant Fc domains include ablation variants E233P/L234V/L235A/G236_/S267K, wherein numbering is according to EU numbering.

[0343] In some embodiments, the constant domain (CH1-hinge-CH2-CH3) of the first monomer includes pI variants (including those shown in FIG. 4). In exemplary embodiments, the constant domain (CH1-hinge-CH2-CH3) of the first monomer includes pI variants N208D/Q295E/N384D/Q418E/N421D, wherein numbering is according to EU numbering.

[0344] In some embodiments, the scFv of the 2+1 Fab₂-scFv-Fc format antibody provided herein includes a charged scFv linker (including those shown in FIG. 6). In some embodiments, the 2+1 Fab₂-scFv-Fc format antibody provided herein includes FcRn variants M428L/N434S, wherein numbering is according to EU numbering.

[0345] In exemplary embodiments, the first variant Fc domain includes heterodimerization skew variants L368D/K370S and the second variant Fc domain includes heterodimerization skew variants S364K/E357Q; each of the first and second variant Fc domains include ablation variants E233P/L234V/L235A/G236_/S267K; and the constant domain (CH1-hinge-CH2-CH3) of the first monomer includes pI variants N208D/Q295E/N384D/Q418E/N421D, wherein numbering is according to EU numbering. In some embodiments, the scFv of the 2+1 Fab₂-scFv-Fc format antibody provided herein includes a (GKPGS)₄ charged scFv linker. In some embodiments, the 2+1 Fab₂-scFv-Fc format antibody provided herein includes FcRn variants M428L/N434S, wherein numbering is according to EU numbering.

[0346] In some embodiments of the 2+1 Fab₂-scFv-Fc format antibody, the two Fab domains are PD-L1 binding domains. In some embodiments, the scFv is the PD-L1 binding domain. Any suitable PD-L1 binding domain can be included in the subject 2+1 Fab₂-scFv-Fc format antibody including those provided herein (FIGS. 28-31 and the Sequence Listing).

[0347] In some embodiments, the PD-L1 binding domain is one of the following PD-L1 binding domains or a variant thereof: 2G4[PDL1]_H1L1, 2G4[PDL1]_H1.12_L1.24, 2G4[PDL1]_H1.12_L1.66, 2G4[PDL1]_H1.12_L1.68, 2G4[PDL1]_H1.12_L1.14, 2G4[PDL1]_H1.4_L1.23, 2G4[PDL1]_H1.4_L1.24, 2G4[PDL1]_H1.9_L1, 2G4[PDL1]_H1.62_L1.63, 2G4[PDL1]_H1.6_L1.3, 2G4[PDL1]_H1.61_L1.61, 2G4[PDL1]_H1.60_L1.60, 2G4[PDL1]_H1.59_L1.60, 2G4[PDL1]_H1.14_L1.26, 2G4[PDL1]_H1_L1.27, 2G4[PDL1]_H1.8_L1.26, 2G4[PDL1]_H1_L1.25, 2G4[PDL1]_H1.10_L1.23, 2G4[PDL1]_H1.1_L1.1, 2G4[PDL1]_H1_L1.29 (FIGS. 28-31 and the Sequence Listing).

[0348] In some embodiments of the 2+1 Fab₂-scFv-Fc format antibody, the PD-L1 binding domain has a variable heavy domain (VH) selected from the group consisting of: SEQ ID NO:1079, SEQ ID NO:1042, SEQ ID NO:1055, SEQ ID NO:1059, SEQ ID NO:1063, SEQ ID NO: 1067, SEQ ID NO: 1071, SEQ ID NO: 1075, SEQ ID NO:1083, SEQ ID NO:1087, SEQ ID NO:1091, SEQ ID NO:1095, SEQ ID NO:1099, and SEQ ID NOs:736-797 or a variant thereof, and a variable light domain (VL) selected from the group consisting of: SEQ ID NO:1111, SEQ ID NO:1046, SEQ ID NO:1103, SEQ ID NO:1107, SEQ ID NO:1115, SEQ ID NO:1119, SEQ ID NO:1123, SEQ ID NO:1127, SEQ ID NO:1131, SEQ ID NO:1135, SEQ ID NO:1139, SEQ ID NO:1143, SEQ ID NO:1147, SEQ ID NO:1151, SEQ ID NO:1155, and SEQ ID NOS:798-868 or a variant thereof.

[0349] In some embodiments, the VH and VL of the PD-L1 binding domain are selected from the group consisting of: a VH having an amino acid sequence of SEQ ID NO: 1183 and a VL having an amino acid sequence of SEQ ID NO:1187; a VH having an amino acid of SEQ ID NO:1042 and a VL having an amino acid sequence of SEQ ID NO:1047; a VH having an amino acid sequence of SEQ ID NO:1159 and a VL having an amino acid sequence of SEQ ID NO:1163; a VH having an amino acid sequence of SEQ ID NO:1167 and a VL having an amino acid sequence of SEQ ID NO:1171; a VH having an amino acid sequence of SEQ ID NO:1175 and a VL having an amino acid sequence of SEQ ID NO:1179; a VH having an amino acid sequence of SEQ ID NO:1191 and a VL having an amino acid sequence of SEQ ID NO:1195; a VH having an amino acid sequence of SEQ ID NO:1199 and a VL having an amino acid sequence of SEQ ID NO:1203; a VH having an amino acid sequence of SEQ ID NO:1207 and a VL having an amino acid sequence of SEQ ID NO:1211; a VH having an amino acid sequence of SEQ ID NO:1215 and a VL having an amino acid sequence of SEQ ID NO:1219; a VH having an amino acid sequence of SEQ ID NO:1223 and a VL having an amino acid sequence of SEQ ID NO:1227; a VH having an amino acid sequence of SEQ ID NO:1231 and a VL having an amino acid sequence of SEQ ID NO:1235; a VH having an amino acid sequence of SEQ ID NO:1239 and a VL having an amino acid sequence of SEQ ID NO:1243; a VH having an amino acid sequence of SEQ ID NO:1247 and a VL having an amino acid sequence of SEQ ID NO:1251; a VH having an amino acid sequence of SEQ ID NO:1255 and a VL having an amino acid sequence of SEQ ID NO:1259; a VH having an amino acid sequence of SEQ ID NO:1263 and a VL having an amino acid sequence of SEQ ID NO:1267; a VH having an amino acid sequence of SEQ ID NO:1271 and a VL having an amino acid sequence of SEQ ID NO:1275; a VH having an amino acid sequence of SEQ ID NO:1279 and a VL having an amino acid sequence of SEQ ID NO:1283; a VH having an amino acid sequence of SEQ ID NO:1287 and a VL having an amino acid sequence of SEQ ID NO:1291; a VH having an amino acid sequence of SEQ ID NO:1295 and a VL having an amino acid sequence of SEQ ID NO:1299; and a VH having an amino acid sequence of SEQ ID NO:1303 and a VL having an amino acid sequence of SEQ ID NO:1307.

[0350] In some embodiments, the PD-L1 binding domain is selected from one of the following PD-L1 binding domains: 2.14H9 OPT, atezolizumab, avelumab, 12A4, 3G10, 10A5, h3D10 Var1, h3D10 Var2, h3D10 Var3, h3D10 Var4, h3D10 Var5, h3D10 Var6, h3D10 Var7, h3D10 Var8, h3D10 Var9, h3D10 Var10, h3D10 Var11, h3D10 Var12, h3D10 Var13, h3D10 Var14, Antibody A, C5H9v2, Humanized 29E.2A3, 1B9, 4H1, mAb-42, BAP058-03, BAP058-04, BAP058-06, BAP058-07, BAP058-11, BAP058-13, H6, RC5, SH1A1Q, SH1B3, SH1D1, SH1D2, SH1D12, SH1E1, SH1G9, SH1E6, SH1A2, SH1B1, H6B1L, H6A1, H6B1, H6B2, G12, RSA1, RA3, SH1E2, SH1E4, SH1B11, SH1C8, H1H9364P2, H1H9373P2, H1H8314N, PDL1.3.1 or a variant thereof.

[0351] In some embodiments, the VH and VL of the PD-L1 binding domain is selected from the following VH and VLs, respectively: SEQ ID NOs:89 and 93, SEQ ID NOs:97 and 101, SEQ ID NOs:105 and 109, SEQ ID NOs:113 and 117, SEQ ID NOs:121 and 125, SEQ ID NOs:129 and 133, SEQ ID NOs:137 and 141, SEQ ID NOs:145 and 149, SEQ ID NOs:153 and 157, SEQ ID NOs:161 and 165, SEQ ID NOs:169 and 173, SEQ ID NOs:177 and 181, SEQ ID NOs:185 and 189, SEQ ID NOs:193 and 197, SEQ ID NOs:201 and 205, SEQ ID NOs:209 and 213, SEQ ID NOs:217 and 221, SEQ ID NOs:225 and 229, SEQ ID NOs:233 and 237, SEQ ID NOs:241 and 245, SEQ ID NOs:249 and 253, SEQ ID NOs:257 and 261, SEQ ID NOs:265 and 269, SEQ ID NOs:273 and 277, SEQ ID NOs:281 and 285, SEQ ID NOs:289 and 293, SEQ ID NOs:297 and 301, SEQ ID NOs:305 and 309, SEQ ID NOs:313 and 317, SEQ ID NOs:321 and 325, SEQ ID NOs:329 and 333, SEQ ID NOs:337 and 341, SEQ ID NOs:345 and 349, SEQ ID NOs:353 and 357, SEQ ID NOs:361 and 365, SEQ ID NOs:369 and 373, SEQ ID NOs:374 and 381, SEQ ID NOs:385 and 389, SEQ ID NOs:393 and 397, SEQ ID NOs:401 and 405, SEQ ID NOs:409 and 413, SEQ ID NOs:417 and 421, SEQ ID NOs:425 and 429, SEQ ID NOs:433 and 437, SEQ ID NOs:441 and 445, SEQ ID NOs:449 and 453, SEQ ID NOs:457 and 461, SEQ ID NOs:465 and 469, SEQ ID NOs:473 and 477, SEQ ID NOs:481 and 485, SEQ ID NOs:489 and 493, SEQ ID NOs:497 and 501, SEQ ID NOs:504 and 508, SEQ ID NOs:512 and 516, SEQ ID NOs:520 and 524, SEQ ID NOs:528 and 534, SEQ ID NOs:537 and 541, SEQ ID NOs:545 and 549, SEQ ID NOs:553 and 557 or variants thereof.

[0352] In some embodiments, the 2+1 Fab₂-scFv-Fc format antibody binds PD-L1 and CD28. In some embodiments, the scFv of the second monomer of the 2+1 Fab₂-scFv-Fc format antibody is a CD28 binding domain and the VH1 of the first and second monomer and the VL1 of the common light chain each form PD-L1 binding domains. In some embodiments, the scFv is a PD-L1 binding domain and the VH1 of the first and second monomer and the VL1 of the common light chain each form CD28 binding domains.

[0353] Any suitable CD28 binding domain can be included in subject 2+1 Fab₂-scFv-Fc format antibody, including any of the CD28 binding domains provided herein (see, e.g., FIGS. 18-23 and the Sequence Listing). In some embodiments, the CD28 binding domain is one of the following CD28 binding domains or a variant thereof: 1A7[CD28]_H1L1, 1A7[CD28]_H1.14L1, 1A7[CD28]_L1H1.14, 1A7[CD28]_H1.1L1, 1A7[CD28]_H1L1.71, 1A7[CD28]_H1.14L1.71, 1A7[CD28]_L1.71H1.14, 1A7[CD28]_H1.1L1.71, and HuTN228[CD28]_H1L1 (FIGS. 18-23 and the Sequence Listing).

[0354] In some embodiments of the 2+1 Fab₂-scFv-Fc format antibody, the CD28 binding domain has a variable heavy domain (VH) selected from the group consisting of: SEQ ID NO:998, SEQ ID NO:984, SEQ ID NO:994 and SEQ ID NOs:561-629 or a variant thereof, and a variable light domain (VL) selected from the group consisting of: SEQ ID NO:1002, SEQ ID NO:984, and SEQ ID NOs:630-735 or a variant thereof. In some embodiments, the VH and VL of the CD28 binding domain are selected from the group consisting of: a VH having an amino acid sequence of SEQ ID NO:1030 and a VL having an amino acid sequence of SEQ ID NO:1034; a VH having an amino acid sequence of SEQ ID NO:1006 and a VL having an amino acid sequence of SEQ ID NO:1010; a VH having an amino acid sequence of SEQ ID NO:1014 and a VL having an amino acid sequence of SEQ ID NO:1018; and a VH having an amino acid sequence of SEQ ID NO:1022 and a VL having an amino acid sequence of SEQ ID NO:1026.

[0355] In exemplary embodiments, the CD28 binding domain includes a 1A7[CD28]_H1.14 variable heavy domain. In some embodiments, the CD28 binding domain includes a 1A7[CD28]_H1.14 variable heavy domain or variant thereof and a light variable domain of any of the CD28 binding domains provided herein. In exemplary embodiments, the CD28 binding domain is 1A7[CD28]_H1.14L1.71 or a variant thereof.

[0356] In some embodiments, the CD28 binding domain is selected from one of the following CD28 binding domains CD28.3[CD28]_H0L0, hCD28.3[CD28]_H1L1, 5.11A1[CD28]_H0L0, TGN1412_H1L1, 341VL34[CD28]_H1L1, 341VL36[CD28]_H1L1, 281VL4[CD28]_H1L1, HuTN228[CD28]_H1L1, PV1[CD28]_H0L0, m9.3[CD28]_H0L0, hu9.3[CD28]_H1L1 or a variant thereof.

[0357] In some embodiments, the VH and VL of the CD28 binding domain is selected from the following VH and VLs, respectively: SEQ ID NOs:1 and 5, SEQ ID NOs:9 and 13, SEQ ID NOs:17 and 21, SEQ ID NOs:25 and 29, SEQ ID NOs:33 and 37, SEQ ID NOs:41 and 46, SEQ ID NOs:49 and 53, SEQ ID NOs:57 and 61, SEQ ID NOs:65 and 69, SEQ ID NOs:73 and 77, and SEQ ID NOs:81 and 85. or variants thereof.

[0358] In some embodiments of the anti-PD-L1×anti-CD28 2+1 Fab₂-scFv-Fc format antibody, the VH1 of the first and second monomer and the VL1 of the common light chain of the 2+1 Fab₂-scFv-Fc format antibody each form a binding domain that binds PD-L1. Any suitable PD-L1 binding domain(s) can be included in the subject 2+1 Fab₂-scFv-Fc format antibody, including any of the PD-L1 antigen binding domains provided herein (see, e.g., FIGS. 28-31 and the Sequence Listing). In exemplary embodiments, the PD-L1 binding domain has a VH with an amino acid sequence of SEQ ID NO:1183 and a VL with an amino acid sequence of SEQ ID NO:1187. In exemplary embodiments, the PD-L1 binding domain has a VH with an amino acid sequence of SEQ ID NO:1042 and a VL with an amino acid sequence of SEQ ID NO:1046. In exemplary embodiments, the PD-L1 binding domain has a VH with an amino acid sequence of SEQ ID NO: 1159 and a VL with an amino acid sequence of SEQ ID NO: 1163.

[0359] FIG. 11 shows some exemplary Fc domain sequences that are useful with the 2+1 Fab2-scFv-Fc format. The “monomer 1” sequences depicted in FIG. 11 typically refer to the Fc domain of the “Fab-Fc heavy chain” and the “monomer 2” sequences refer to the Fc domain of the “Fab-scFv-Fc heavy chain.” In addition, FIGS. 12-15 provides exemplary CH1-hinge domains, CH1 domains, and hinge domains that can be included in the first or second monomer of the 2+1 Fab2-scFv-Fc format. Further, FIG. 16 provides useful CL sequences that can be used with this format.

[0360] Exemplary anti-PD-L1×anti-CD28×antibodies in the 2+1 Fab₂-scFv-Fc format are depicted in FIGS. 36 and 41. In some embodiments, the anti-PD-L1×anti-CD28×antibody is an antibody depicted in FIG. 36 or 41.

[0361] 3. 1+1 CLC Format

[0362] One heterodimeric antibody format that finds particular use in subject bispecific antibodies provided herein (e.g., anti-PD-L1×anti-CD28 antibody) is the “1+1 Common Light Chain” or “1+1 CLC” format, which is depicted in FIG. 26C. The 1+1 CLC format antibody includes a first monomer that includes a VH1-CH1-hinge-CH2-CH3, wherein VH1 is a first variable heavy domain and CH2-CH3 is a first Fc domain; a second monomer that includes a VH2-CH1-hinge-CH2-CH3, wherein VH2 is a second variable heavy domain and CH2-C3 is a second Fc domain; and a third monomer “common light chain” comprising VL-CL, wherein VL is a common variable light domain and CL is a constant light domain. In such embodiments, the VL pairs with the VH1 to form a first binding domain with a first antigen binding specificity; and the VL pairs with the VH2 to form a second binding domain with a second antigen binding specificity. In some embodiments, the 1+1 CLC format antibody is a bivalent antibody.

[0363] In some embodiments, the first and second Fc domains of the 1+1 CLC format are variant Fc domains that include heterodimerization skew variants (e.g., a set of amino acid substitutions as shown in FIGS. 3 and 8). Particularly useful heterodimerization skew variants include S364K/E357Q: L368D/K370S; L368D/K370S: S364K; L368E/K370S: S364K; T411T/E360E/Q362E: D401K; L368D/K370S: S364K/E357L; K370S: S364K/E357Q; T366S/L368A/Y407V: T366W and T366S/L368A/Y407V/Y349C: T366W/S354C (EU numbering). In exemplary embodiments, one of the first or second variant Fc domains includes heterodimerization skew variants L368D/K370S and the other of the first or second variant Fc domains includes heterodimerization skew variants S364K/E357Q, wherein numbering is according to EU numbering. In exemplary embodiments, the first variant Fc domain includes heterodimerization skew variants L368D/K370S and the second variant Fc domain includes heterodimerization skew variants S364K/E357Q, wherein numbering is according to EU numbering.

[0364] In some embodiments, the variant Fc domains include ablation variants (including those shown in FIG. 5). In some embodiments, each of the first and second variant Fc domains include ablation variants E233P/L234V/L235A/G236_/S267K, wherein numbering is according to EU numbering.

[0365] In some embodiments, the constant domain (CH1-hinge-CH2-CH3) of the first or second monomer includes pI variants (including those shown in FIG. 4). In exemplary embodiments, the constant domain (CH1-hinge-CH2-CH3) of the first or second monomer includes pI variants N208D/Q295E/N384D/Q418E/N421D, wherein numbering is according to EU numbering.

[0366] In some embodiments, the 1+1 CLC format antibody provided herein includes FcRn variants M428L/N434S, wherein numbering is according to EU numbering.

[0367] In exemplary embodiments, the first variant Fc domain includes heterodimerization skew variants L368D/K370S and the second variant Fc domain includes heterodimerization skew variants S364K/E357Q; each of the first and second variant Fc domains include ablation variants E233P/L234V/L235A/G236_/S267K; and the constant domain (CH1-hinge-CH2-CH3) of the first monomer includes pI variants N208D/Q295E/N384D/Q418E/N421D, wherein numbering is according to EU numbering. In some embodiments, the 1+1 CLC format antibody provided herein further includes FcRn variants M428L/N434S, wherein numbering is according to EU numbering.

[0368] In some embodiments of the 1+1 CLC format antibody, one of the first or second antigen binding domain is a PD-L1 binding domain. Any suitable PD-L1 binding domain can be included in the subject antibody including those provided herein (FIGS. 28-31 and the Sequence Listing).

[0369] In some embodiments, the PD-L1 binding domain is one of the following PD-L1 binding domains or a variant thereof: 2G4[PDL1]_H1L1, 2G4[PDL1]_H1.12_L1.24, 2G4[PDL1]_H1.12_L1.66, 2G4[PDL1]_H1.12_L1.68, 2G4[PDL1]_H1.12_L1.14, 2G4[PDL1]_H1.4_L1.23, 2G4[PDL1]_H1.4_L1.24, 2G4[PDL1]_H1.9_L1, 2G4[PDL1]_H1.62_L1.63, 2G4[PDL1]_H1.6_L1.3, 2G4[PDL1]_H1.61_L1.61, 2G4[PDL1]_H1.60_L1.60, 2G4[PDL1]_H1.59_L1.60, 2G4[PDL1]_H1.14_L1.26, 2G4[PDL1]_H1_L1.27, 2G4[PDL1]_H1.8_L1.26, 2G4[PDL1]_H1_L1.25, 2G4[PDL1]_H1.10_L1.23, 2G4[PDL1]_H1.1_L1.1, 2G4[PDL1]_H1_L1.29 (FIGS. 28-31 and the Sequence Listing).

[0370] In some embodiments of the 1+1 CLC format antibody, the PD-L1 binding domain has a variable heavy domain (VH) selected from the group consisting of: SEQ ID NO:1079, SEQ ID NO:1042, SEQ ID NO:1055, SEQ ID NO:1059, SEQ ID NO:1063, SEQ ID NO: 1067, SEQ ID NO: 1071, SEQ ID NO: 1075, SEQ ID NO:1083, SEQ ID NO:1087, SEQ ID NO:1091, SEQ ID NO:1095, and SEQ ID NO:1099; and a variable light domain (VL) selected from the group consisting of: SEQ ID NO: 1111, SEQ ID NO:1046, SEQ ID NO: 1103, SEQ ID NO:1107, SEQ ID NO:1115, SEQ ID NO:1119, SEQ ID NO:1123, SEQ ID NO:1127, SEQ ID NO:1131, SEQ ID NO:1135, SEQ ID NO:1139, SEQ ID NO:1143, SEQ ID NO:1147, SEQ ID NO:1151, SEQ ID NO:1155, and SEQ ID NOs:798-868. In some embodiments, the VH and VL of the PD-L1 binding domain are selected from the group consisting of: a VH having an amino acid sequence of SEQ ID NO: 1183 and a VL having an amino acid sequence of SEQ ID NO: 1187; a VH having an amino acid of SEQ ID NO:1042 and a VL having an amino acid sequence of SEQ ID NO:1047; a VH having an amino acid sequence of SEQ ID NO:1159 and a VL having an amino acid sequence of SEQ ID NO:1163; a VH having an amino acid sequence of SEQ ID NO:1167 and a VL having an amino acid sequence of SEQ ID NO:1171; a VH having an amino acid sequence of SEQ ID NO:1175 and a VL having an amino acid sequence of SEQ ID NO:1179; a VH having an amino acid sequence of SEQ ID NO:1191 and a VL having an amino acid sequence of SEQ ID NO:1195; a VH having an amino acid sequence of SEQ ID NO:1199 and a VL having an amino acid sequence of SEQ ID NO:1203; a VH having an amino acid sequence of SEQ ID NO:1207 and a VL having an amino acid sequence of SEQ ID NO:1211; a VH having an amino acid sequence of SEQ ID NO:1215 and a VL having an amino acid sequence of SEQ ID NO:1219; a VH having an amino acid sequence of SEQ ID NO:1223 and a VL having an amino acid sequence of SEQ ID NO:1227; a VH having an amino acid sequence of SEQ ID NO:1231 and a VL having an amino acid sequence of SEQ ID NO:1235; a VH having an amino acid sequence of SEQ ID NO:1239 and a VL having an amino acid sequence of SEQ ID NO:1243; a VH having an amino acid sequence of SEQ ID NO:1247 and a VL having an amino acid sequence of SEQ ID NO:1251; a VH having an amino acid sequence of SEQ ID NO:1255 and a VL having an amino acid sequence of SEQ ID NO:1259; a VH having an amino acid sequence of SEQ ID NO:1263 and a VL having an amino acid sequence of SEQ ID NO:1267; a VH having an amino acid sequence of SEQ ID NO:1271 and a VL having an amino acid sequence of SEQ ID NO:1275; a VH having an amino acid sequence of SEQ ID NO:1279 and a VL having an amino acid sequence of SEQ ID NO:1283; a VH having an amino acid sequence of SEQ ID NO:1287 and a VL having an amino acid sequence of SEQ ID NO:1291; a VH having an amino acid sequence of SEQ ID NO:1295 and a VL having an amino acid sequence of SEQ ID NO:1299; and a VH having an amino acid sequence of SEQ ID NO:1303 and a VL having an amino acid sequence of SEQ ID NO:1307.

[0371] In some embodiments, the PD-L1 binding domain is selected from one of the following PD-L1 binding domains: 2.14H9 OPT, atezolizumab, avelumab, 12A4, 3G10, 10A5, h3D10 Var1, h3D10 Var2, h3D10 Var3, h3D10 Var4, h3D10 Var5, h3D10 Var6, h3D10 Var7, h3D10 Var8, h3D10 Var9, h3D10 Var10, h3D10 Var11, h3D10 Var12, h3D10 Var13, h3D10 Var14, Antibody A, C5H9v2, Humanized 29E.2A3, 1B9, 4H1, mAb-42, BAP058-03, BAP058-04, BAP058-06, BAP058-07, BAP058-11, BAP058-13, H6, RC5, SH1A1Q, SH1B3, SH1D1, SH1D2, SH1D12, SH1E1, SH1G9, SH1E6, SH1A2, SH1B1, H6B1L, H6A1, H6B1, H6B2, G12, RSA1, RA3, SH1E2, SH1E4, SH1B11, SH1C8, H1H9364P2, H1H9373P2, H1H8314N, PDL1.3.1 or a variant thereof.

[0372] In some embodiments, the VH and VL of the PD-L1 binding domain is selected from the following VH and VLs, respectively: SEQ ID NOs:89 and 93, SEQ ID NOs:97 and 101, SEQ ID NOs:105 and 109, SEQ ID NOs:113 and 117, SEQ ID NOs:121 and 125, SEQ ID NOs:129 and 133, SEQ ID NOs:137 and 141, SEQ ID NOs:145 and 149, SEQ ID NOs:153 and 157, SEQ ID NOs:161 and 165, SEQ ID NOs:169 and 173, SEQ ID NOs:177 and 181, SEQ ID NOs:185 and 189, SEQ ID NOs:193 and 197, SEQ ID NOs:201 and 205, SEQ ID NOs:209 and 213, SEQ ID NOs:217 and 221, SEQ ID NOs:225 and 229, SEQ ID NOs:233 and 237, SEQ ID NOs:241 and 245, SEQ ID NOs:249 and 253, SEQ ID NOs:257 and 261, SEQ ID NOs:265 and 269, SEQ ID NOs:273 and 277, SEQ ID NOs:281 and 285, SEQ ID NOs:289 and 293, SEQ ID NOs:297 and 301, SEQ ID NOs:305 and 309, SEQ ID NOs:313 and 317, SEQ ID NOs:321 and 325, SEQ ID NOs:329 and 333, SEQ ID NOs:337 and 341, SEQ ID NOs:345 and 349, SEQ ID NOs:353 and 357, SEQ ID NOs:361 and 365, SEQ ID NOs:369 and 373, SEQ ID NOs:374 and 381, SEQ ID NOs:385 and 389, SEQ ID NOs:393 and 397, SEQ ID NOs:401 and 405, SEQ ID NOs:409 and 413, SEQ ID NOs:417 and 421, SEQ ID NOs:425 and 429, SEQ ID NOs:433 and 437, SEQ ID NOs:441 and 445, SEQ ID NOs:449 and 453, SEQ ID NOs:457 and 461, SEQ ID NOs:465 and 469, SEQ ID NOs:473 and 477, SEQ ID NOs:481 and 485, SEQ ID NOs:489 and 493, SEQ ID NOs:497 and 501, SEQ ID NOs:504 and 508, SEQ ID NOs:512 and 516, SEQ ID NOs:520 and 524, SEQ ID NOs:528 and 534, SEQ ID NOs:537 and 541, SEQ ID NOs:545 and 549, SEQ ID NOs:553 and 557 or variants thereof.

[0373] In some embodiments, the 1+1 CLC format antibody is a bispecific antibody that binds PD-L1 and CD28. In some embodiments, one of the first binding domain or the second binding domain binds CD28 and the other binding domain binds PD-L1. Any suitable CD28 binding domain can be included in subject 1+1 CLC format antibody, including any of the CD28 binding domains provided herein. In some embodiments, the CD28 binding domain is one of the following CD28 binding domains or a variant thereof: 1A7[CD28]_H1L1, 1A7[CD28]_H1.14L1, 1A7[CD28]_L1H1.14, 1A7[CD28]_H1.1L1, 1A7[CD28]_H1L1.71, 1A7[CD28]_H1.14L1.71, 1A7[CD28]_L1.71H1.14, 1A7[CD28]_H1.1L1.71, and HuTN228[CD28]_H1L1 (FIGS. 18-23 and the Sequence Listing).

[0374] In some embodiments of the 1+1 CLC format antibody, the CD28 binding domain has a variable heavy domain (VH) selected from the group consisting of: SEQ ID NO:998, SEQ ID NO:984, SEQ ID NO:994 and SEQ ID NOs:561-629 or a variant thereof, and a variable light domain (VL) selected from the group consisting of: SEQ ID NO:1002, SEQ ID NO:984, and SEQ ID NOs:630-735 or a variant thereof. In some embodiments, the VH and VL of the CD28 binding domain are selected from the group consisting of: a VH having an amino acid sequence of SEQ ID NO:1030 and a VL having an amino acid sequence of SEQ ID NO:1034; a VH having an amino acid sequence of SEQ ID NO:1006 and a VL having an amino acid sequence of SEQ ID NO:1010; a VH having an amino acid sequence of SEQ ID NO:1014 and a VL having an amino acid sequence of SEQ ID NO:1018; and a VH having an amino acid sequence of SEQ ID NO:1022 and a VL having an amino acid sequence of SEQ ID NO:1026.

[0375] In exemplary embodiments, the CD28 binding domain includes a 1A7[CD28]_H1.14 variable heavy domain. In some embodiments, the CD28 binding domain includes a 1A7[CD28]_H1.14 variable heavy domain or variant thereof and a light variable domain of any of the CD28 binding domains provided herein. In exemplary embodiments, the CD28 binding domain is 1A7[CD28]_H1.14L1.71 or a variant thereof.

[0376] In some embodiments, the CD28 binding domain is selected from one of the following CD28 binding domains CD28.3[CD28]_H0L0, hCD28.3[CD28]_H1L1, 5.11A1[CD28]_H0L0, TGN1412_H1L1, 341VL34[CD28]_H1L1, 341VL36[CD28]_H1L1, 281VL4[CD28]_H1L1, HuTN228[CD28]_H1L1, PV1[CD28]_H0L0, m9.3[CD28]_H0L0, hu9.3[CD28]_H11L1 or a variant thereof.

[0377] In some embodiments, the VH and VL of the CD28 binding domain is selected from the following VH and VLs, respectively: SEQ ID NOs:1 and 5, SEQ ID NOs:9 and 13, SEQ ID NOs:17 and 21, SEQ ID NOs:25 and 29, SEQ ID NOs:33 and 37, SEQ ID NOs:41 and 46, SEQ ID NOs:49 and 53, SEQ ID NOs:57 and 61, SEQ ID NOs:65 and 69, SEQ ID NOs:73 and 77, and SEQ ID NOs:81 and 85. or variants thereof.

[0378] In some embodiments, one of the first binding domain or the second binding domain of the 1+1 CLC format antibody binds PD-L1. Any suitable PD-L1 antigen binding domain can be included, including those described herein (see, e.g., FIGS. 28-31 and the Sequence Listing). In some embodiments, the 1+1 CLC format antibody includes a PD-L1 antigen binding domain that includes a variable heavy domain of one of the PD-L1 antigen binding domains provided herein (see, e.g., FIGS. 28-31 and the Sequence Listing). In exemplary embodiments, the PD-L1 binding domain has a VH with an amino acid sequence of SEQ ID NO:1183 and a VL with an amino acid sequence of SEQ ID NO:1187. In exemplary embodiments, the PD-L1 binding domain has a VH with an amino acid sequence of SEQ ID NO:1042 and a VL with an amino acid sequence of SEQ ID NO:1046. In exemplary embodiments, the PD-L1 binding domain has a VH with an amino acid sequence of SEQ ID NO:1159 and a VL with an amino acid sequence of SEQ ID NO:1163.

[0379] 4. 2+1 CLC Format

[0380] Another heterodimeric antibody format that finds particular use in subject bispecific antibodies provided herein (e.g., anti-PD-L1×anti-CD28 antibody) is the “2+1 Common Light Chain” or “2+1 CLC” format, which is depicted in FIG. 26D. The 2+1 CLC format includes a first monomer that includes a VH1-CH1-linker-VH1-CH1-hinge-CH2-CH3, wherein the VH1s are each a first variable heavy domain and CH2-CH3 is a first Fc domain; a second monomer that includes a VH2-CH1-hinge-CH2-CH3, wherein VH2 is a second variable heavy domain and CH2-CH3 is a second Fc domain; and a third monomer that includes a “common light chain” VL-CL, wherein VL is a common variable light domain and CL is a constant light domain. The VL pairs with each of the VH1s of the first monomer to form two first binding domains, each with a first antigen binding specificity; and the VL pairs with the VH2 to form a second binding domain with a second antigen binding specificity. The linker of the first monomer can be any suitable linker, including any one of the domain linkers or combinations thereof described in FIG. 7. In some embodiments, the linker is EPKSCGKPGSGKPGS (SEQ ID NO:936). In some embodiments, the 2+1 CLC format antibody is a trivalent antibody.

[0381] In some embodiments, the first and second Fc domains of the 2+1 CLC format are variant Fc domains that include heterodimerization skew variants (e.g., a set of amino acid substitutions as shown in FIGS. 3 and 8). Particularly useful heterodimerization skew variants include S364K/E357Q: L368D/K370S; L368D/K370S: S364K; L368E/K370S: S364K; T411T/E360E/Q362E: D401K; L368D/K370S: S364K/E357L; K370S: S364K/E357Q; T366S/L368A/Y407V: T366W and T366S/L368A/Y407V/Y349C: T366W/S354C (EU numbering)). In exemplary embodiments, one of the first or second variant Fc domains includes heterodimerization skew variants L368D/K370S and the other of the first or second variant Fc domains includes heterodimerization skew variants S364K/E357Q, wherein numbering is according to EU numbering. In exemplary embodiments, the first variant Fc domain includes heterodimerization skew variants L368D/K370S and the second variant Fc domain includes heterodimerization skew variants S364K/E357Q, wherein numbering is according to EU numbering.

[0382] In some embodiments, the variant Fc domains include ablation variants (including those shown in FIG. 5). In some embodiments, each of the first and second variant Fc domains include ablation variants E233P/L234V/L235A/G236_/S267K, wherein numbering is according to EU numbering.

[0383] In some embodiments, the constant domain (CH1-hinge-CH2-CH3) of the first or second monomer includes pI variants (including those shown in FIG. 4). In exemplary embodiments, the constant domain (CH1-hinge-CH2-CH3) of the first or second monomer includes pI variants N208D/Q295E/N384D/Q418E/N421D, wherein numbering is according to EU numbering.

[0384] In some embodiments, the 2+1 CLC format antibody provided herein further includes FcRn variants M428L/N434S, wherein numbering is according to EU numbering.

[0385] In exemplary embodiments, the first variant Fc domain includes heterodimerization skew variants L368D/K370S and the second variant Fc domain includes heterodimerization skew variants S364K/E357Q; each of the first and second variant Fc domains include ablation variants E233P/L234V/L235A/G236_/S267K; and the constant domain (CH1-hinge-CH2-CH3) of the first monomer includes pI variants N208D/Q295E/N384D/Q418E/N421D, wherein numbering is according to EU numbering. In some embodiments, the 2+1 CLC format antibody provided herein further includes FcRn variants M428L/N434S, wherein numbering is according to EU numbering.

[0386] In some embodiments of the 2+1 CLC format antibody, each of the two first binding domains is a PD-L1 binding domain. In some embodiments, the second binding domain is a PD-L1 binding domain. Any suitable PD-L1 binding domain can be included in the subject antibody including those provided herein (see, e.g., FIGS. 28-31 and the Sequence Listing).

[0387] In some embodiments, the PD-L1 binding domain is one of the following PD-L1 binding domains or a variant thereof: 2G4[PDL1]_H1L1, 2G4[PDL1]_H1.12_L1.24, 2G4[PDL1]_H1.12_L1.66, 2G4[PDL1]_H1.12_L1.68, 2G4[PDL1]_H1.12_L1.14, 2G4[PDL1]_H1.4_L1.23, 2G4[PDL1]_H1.4_L1.24, 2G4[PDL1]_H1.9_L1, 2G4[PDL1]_H1.62_L1.63, 2G4[PDL1]_H1.6_L1.3, 2G4[PDL1]_H1.61_L1.61, 2G4[PDL1]_H1.60_L1.60, 2G4[PDL1]_H1.59_L1.60, 2G4[PDL1]_H1.14_L1.26, 2G4[PDL1]_H1_L1.27, 2G4[PDL1]_H1.8_L1.26, 2G4[PDL1]_H1_L1.25, 2G4[PDL1]_H1.10_L1.23, 2G4[PDL1]_H1.1_L1.1, 2G4[PDL1]_H1_L1.29 (FIGS. 28-31 and the Sequence Listing).

[0388] In some embodiments of the 2+1 CLC format antibody, the PD-L1 binding domain has a variable heavy domain (VH) selected from the group consisting of: SEQ ID NO:1079, SEQ ID NO:1042, SEQ ID NO:1055, SEQ ID NO:1059, SEQ ID NO:1063, SEQ ID NO: 1067, SEQ ID NO: 1071, SEQ ID NO: 1075, SEQ ID NO:1083, SEQ ID NO:1087, SEQ ID NO:1091, SEQ ID NO:1095, SEQ ID NO:1099, and SEQ ID NOs:736-797 or a variant thereof, and a variable light domain (VL) selected from the group consisting of: SEQ ID NO: 1111, SEQ ID NO:1046, SEQ ID NO:1103, SEQ ID NO:1107, SEQ ID NO:1115, SEQ ID NO:1119, SEQ ID NO:1123, SEQ ID NO:1127, SEQ ID NO:1131, SEQ ID NO:1135, SEQ ID NO:1139, SEQ ID NO:1143, SEQ ID NO:1147, SEQ ID NO:1151, SEQ ID NO:1155, and SEQ ID NOs:798-868 or a variant thereof. In some embodiments, the VH and VL of the PD-L1 binding domain are selected from the group consisting of: a VH having an amino acid sequence of SEQ ID NO: 1183 and a VL having an amino acid sequence of SEQ ID NO: 1187; a VH having an amino acid of SEQ ID NO:1042 and a VL having an amino acid sequence of SEQ ID NO:1047; a VH having an amino acid sequence of SEQ ID NO:1159 and a VL having an amino acid sequence of SEQ ID NO: 1163; a VH having an amino acid sequence of SEQ ID NO: 1167 and a VL having an amino acid sequence of SEQ ID NO:1171; a VH having an amino acid sequence of SEQ ID NO: 1175 and a VL having an amino acid sequence of SEQ ID NO: 1179; a VH having an amino acid sequence of SEQ ID NO: 1191 and a VL having an amino acid sequence of SEQ ID NO: 1195; a VH having an amino acid sequence of SEQ ID NO: 1199 and a VL having an amino acid sequence of SEQ ID NO:1203; a VH having an amino acid sequence of SEQ ID NO:1207 and a VL having an amino acid sequence of SEQ ID NO:1211; a VH having an amino acid sequence of SEQ ID NO:1215 and a VL having an amino acid sequence of SEQ ID NO:1219; a VH having an amino acid sequence of SEQ ID NO:1223 and a VL having an amino acid sequence of SEQ ID NO:1227; a VH having an amino acid sequence of SEQ ID NO:1231 and a VL having an amino acid sequence of SEQ ID NO:1235; a VH having an amino acid sequence of SEQ ID NO:1239 and a VL having an amino acid sequence of SEQ ID NO:1243; a VH having an amino acid sequence of SEQ ID NO:1247 and a VL having an amino acid sequence of SEQ ID NO:1251; a VH having an amino acid sequence of SEQ ID NO:1255 and a VL having an amino acid sequence of SEQ ID NO:1259; a VH having an amino acid sequence of SEQ ID NO:1263 and a VL having an amino acid sequence of SEQ ID NO:1267; a VH having an amino acid sequence of SEQ ID NO:1271 and a VL having an amino acid sequence of SEQ ID NO:1275; a VH having an amino acid sequence of SEQ ID NO:1279 and a VL having an amino acid sequence of SEQ ID NO:1283; a VH having an amino acid sequence of SEQ ID NO:1287 and a VL having an amino acid sequence of SEQ ID NO:1291; a VH having an amino acid sequence of SEQ ID NO:1295 and a VL having an amino acid sequence of SEQ ID NO:1299; and a VH having an amino acid sequence of SEQ ID NO:1303 and a VL having an amino acid sequence of SEQ ID NO:1307.

[0389] In some embodiments, the PD-L1 binding domain is selected from one of the following PD-L1 binding domains: 2.14H9 OPT, atezolizumab, avelumab, 12A4, 3G10, 10A5, h3D10 Var1, h3D10 Var2, h3D10 Var3, h3D10 Var4, h3D10 Var5, h3D10 Var6, h3D10 Var7, h3D10 Var8, h3D10 Var9, h3D10 Var10, h3D10 Var11, h3D10 Var12, h3D10 Var13, h3D10 Var14, Antibody A, C5H9v2, Humanized 29E.2A3, 1B9, 4H1, mAb-42, BAP058-03, BAP058-04, BAP058-06, BAP058-07, BAP058-11, BAP058-13, H6, RC5, SH1A1Q, SH1B3, SH1D1, SH1D2, SH1D12, SH1E1, SH1G9, SH1E6, SH1A2, SH1B1, H6B1L, H6A1, H6B1, H6B2, G12, RSA1, RA3, SH1E2, SH1E4, SH1B11, SH1C8, H1H9364P2, H1H9373P2, H1H8314N, PDL1.3.1 or a variant thereof.

[0390] In some embodiments, the VH and VL of the PD-L1 binding domain is selected from the following VH and VLs, respectively: SEQ ID NOs:89 and 93, SEQ ID NOs:97 and 101, SEQ ID NOs:105 and 109, SEQ ID NOs:113 and 117, SEQ ID NOs:121 and 125, SEQ ID NOs:129 and 133, SEQ ID NOs:137 and 141, SEQ ID NOs:145 and 149, SEQ ID NOs:153 and 157, SEQ ID NOs:161 and 165, SEQ ID NOs:169 and 173, SEQ ID NOs:177 and 181, SEQ ID NOs:185 and 189, SEQ ID NOs:193 and 197, SEQ ID NOs:201 and 205, SEQ ID NOs:209 and 213, SEQ ID NOs:217 and 221, SEQ ID NOs:225 and 229, SEQ ID NOs:233 and 237, SEQ ID NOs:241 and 245, SEQ ID NOs:249 and 253, SEQ ID NOs:257 and 261, SEQ ID NOs:265 and 269, SEQ ID NOs:273 and 277, SEQ ID NOs:281 and 285, SEQ ID NOs:289 and 293, SEQ ID NOs:297 and 301, SEQ ID NOs:305 and 309, SEQ ID NOs:313 and 317, SEQ ID NOs:321 and 325, SEQ ID NOs:329 and 333, SEQ ID NOs:337 and 341, SEQ ID NOs:345 and 349, SEQ ID NOs:353 and 357, SEQ ID NOs:361 and 365, SEQ ID NOs:369 and 373, SEQ ID NOs:374 and 381, SEQ ID NOs:385 and 389, SEQ ID NOs:393 and 397, SEQ ID NOs:401 and 405, SEQ ID NOs:409 and 413, SEQ ID NOs:417 and 421, SEQ ID NOs:425 and 429, SEQ ID NOs:433 and 437, SEQ ID NOs:441 and 445, SEQ ID NOs:449 and 453, SEQ ID NOs:457 and 461, SEQ ID NOs:465 and 469, SEQ ID NOs:473 and 477, SEQ ID NOs:481 and 485, SEQ ID NOs:489 and 493, SEQ ID NOs:497 and 501, SEQ ID NOs:504 and 508, SEQ ID NOs:512 and 516, SEQ ID NOs:520 and 524, SEQ ID NOs:528 and 534, SEQ ID NOs:537 and 541, SEQ ID NOs:545 and 549, SEQ ID NOs:553 and 557 or variants thereof.

[0391] In some embodiments, the 2+1 CLC format antibody is a bispecific antibody that binds PD-L1 and CD28. In some embodiments, each of the two first binding domains binds PD-L1 and the second binding domain binds CD28. In some embodiments, each of the two first binding domains binds CD28 and the second binding domain binds PD-L1. Any suitable CD28 binding domain can be included in the subject 2+1 CLC format antibody, including any of the CD28 binding domains provided herein. In some embodiments, the CD28 binding domain is one of the following CD28 binding domains or a variant thereof: 1A7[CD28]_H1L1, 1A7[CD28]_H1.14L1, 1A7[CD28]_L1H1.14, 1A7[CD28]_H1.1L1, 1A7[CD28]_H1L1.71, 1A7[CD28]_H1.14L1.71, 1A7[CD28]_L1.71H1.14, 1A7[CD28]_H1.1L1.71, and HuTN228[CD28]_H1L1 (see, e.g., FIGS. 18-23 and the Sequence Listing). In some embodiments of the 2+1 CLC format antibody, the CD28 binding domain has a variable heavy domain (VH) selected from the group consisting of: SEQ ID NO:998, SEQ ID NO:984, SEQ ID NO:994 and SEQ ID NOs:561-629 or a variant thereof, and a variable light domain (VL) selected from the group consisting of: SEQ ID NO:1002, SEQ ID NO:984, and SEQ ID NOs:630-735 or a variant thereof. In some embodiments, the VH and VL of the CD28 binding domain are selected from the group consisting of: a VH having an amino acid sequence of SEQ ID NO:1030 and a VL having an amino acid sequence of SEQ ID NO:1034; a VH having an amino acid sequence of SEQ ID NO:1006 and a VL having an amino acid sequence of SEQ ID NO:1010; a VH having an amino acid sequence of SEQ ID NO:1014 and a VL having an amino acid sequence of SEQ ID NO:1018; and a VH having an amino acid sequence of SEQ ID NO:1022 and a VL having an amino acid sequence of SEQ ID NO:1026.

[0392] In exemplary embodiments, the CD28 binding domain includes a 1A7[CD28]_H1.14 variable heavy domain. In some embodiments, the CD28 binding domain includes a 1A7[CD28]_H1.14 variable heavy domain or variant thereof and a light variable domain of any of the CD28 binding domains provided herein. In exemplary embodiments, the CD28 binding domain is 1A7[CD28]_H1.14L1.71 or a variant thereof.

[0393] In some embodiments, the CD28 binding domain is selected from one of the following CD28 binding domains CD28.3[CD28]_H0L0, hCD28.3[CD28]_H1L1, 5.11A1[CD28]_H0L0, TGN1412_H1L1, 341VL34[CD28]_H1L1, 341VL36[CD28]_H1L1, 281VL4[CD28]_H1L1, HuTN228[CD28]_H1L1, PV1[CD28]_H0L0, m9.3[CD28]_H0L0, hu9.3[CD28]_H1L1 or a variant thereof.

[0394] In some embodiments, the VH and VL of the CD28 binding domain is selected from the following VH and VLs, respectively: SEQ ID NOs:1 and 5, SEQ ID NOs:9 and 13, SEQ ID NOs:17 and 21, SEQ ID NOs:25 and 29, SEQ ID NOs:33 and 37, SEQ ID NOs:41 and 46, SEQ ID NOs:49 and 53, SEQ ID NOs:57 and 61, SEQ ID NOs:65 and 69, SEQ ID NOs:73 and 77, and SEQ ID NOs:81 and 85. or variants thereof.

[0395] Any suitable PD-L1 binding domain can be included in the subject anti-PD-L1×anti-CD28 2+1 CLC format antibody, including any of the PD-L1 antigen binding domains provided herein (see, e.g., FIGS. 28-31 and the Sequence Listing). In exemplary embodiments, the PD-L1 binding domain(s) has a VH with an amino acid sequence of SEQ ID NO:1183 and a VL with an amino acid sequence of SEQ ID NO: 1187. In exemplary embodiments, the PD-L1 binding domain has a VH with an amino acid sequence of SEQ ID NO:1042 and a VL with an amino acid sequence of SEQ ID NO:1046. In exemplary embodiments, the PD-L1 binding domain has a VH with an amino acid sequence of SEQ ID NO:1159 and a VL with an amino acid sequence of SEQ ID NO:1163.

[0396] FIG. 13 depicts sequences for “CH1+half hinge” domain linker that find use in embodiments of the 2+1 CLC format. In the 2+1 CLC format, the “CH1+half hinge” sequences find use linking the first variable heavy domain (VH) to the second V_{H} domain on the Fab-Fab-Fc side of the bispecific antibody.

[0397] 5. 2+1 mAb-scFv Format

[0398] One heterodimeric antibody format that finds particular use in the subject bispecific antibodies provided herein (e.g., anti-PD-L1×anti-CD28 antibody) is the 2+1 mAb-scFv format shown in FIG. 26E. This antibody format includes three antigen binding domains: two Fab portions and an scFv that is attached to the C-terminal of one of the heavy chains. In some embodiments of this format, the Fab portions each bind PD-L1. In some embodiments, the “extra” scFv domain binds CD28. That is, this mAb-scFv format is a trivalent antibody.

[0399] In these embodiments, the first chain or monomer comprises, from N- to C-terminal, VH1-CH1-hinge-CH2-CH3, the second monomer comprises, from N- to C-terminal, VH1-CH1-hinge-CH2-CH3-domain linker-scFv domain, where the scFv domain comprises a second VH (VH2), a second VL (VL2) and a scFv linker. As for all the scFv domains herein, the scFv domain can be in either orientation, from N- to C-terminal, VH2-scFv linker-VL2 or VL2-scFv linker-VH2. Accordingly, the second monomer may comprise, from N- to C-terminal, VH1-CH1-hinge-CH2-CH3-domain linker-VH2-scFv linker-VL2 or VH1-CH1-hinge-CH2-CH3-domain linker-VL2-scFv linker-VH2. The composition also comprises a light chain, VL1-CL. In these embodiments, the VH1-VL1 each form a first ABD and the VH2-VL2 form a second ABD. In some embodiments, the first ABD binds to a tumor target antigen, including human B7H3, and the second ABD binds human CD28.

[0400] In some embodiments, the first and second Fc domains of the 2+1 mAb-scFv format antibody are variant Fc domains that include heterodimerization skew variants (e.g., a set of amino acid substitutions as shown in FIGS. 3 and 9). Particularly useful heterodimerization skew variants include S364K/E357Q: L368D/K370S; L368D/K370S: S364K; L368E/K370S S364K; T411T/E360E/Q362E: D401K; L368D/K370S: S364K/E357L; K370S: S364K/E357Q; T366S/L368A/Y407V: T366W and T366S/L368A/Y407V/Y349C: T366W/S354C (EU numbering)). In exemplary embodiments, one of the first or second variant Fc domains includes heterodimerization skew variants L368D/K370S and the other of the first or second variant Fc domains includes heterodimerization skew variants S364K/E357Q, wherein numbering is according to EU numbering. In exemplary embodiments, the first variant Fc domain includes heterodimerization skew variants L368D/K370S and the second variant Fc domain includes heterodimerization skew variants S364K/E357Q, wherein numbering is according to EU numbering.

[0401] In some embodiments, the variant Fc domains include ablation variants (including those shown in FIG. 5). In some embodiments, each of the first and second variant Fc domains include ablation variants E233P/L234V/L235A/G236_/S267K, wherein numbering is according to EU numbering.

[0402] In some embodiments, the constant domain (CH1-hinge-CH2-CH3) of the first monomer includes pI variants (including those shown in FIG. 4). In exemplary embodiments, the constant domain (CH1-hinge-CH2-CH3) of the first monomer includes pI variants N208D/Q295E/N384D/Q418E/N421D, wherein numbering is according to EU numbering.

[0403] In some embodiments, the scFv of the 2+1 mAb-scFv format antibody provided herein includes a charged scFv linker (including those shown in FIG. 6). In some embodiments, the 2+1 mAb-scFv format antibody provided herein includes FcRn variants M428L/N434S, wherein numbering is according to EU numbering.

[0404] In exemplary embodiments, the first variant Fc domain includes heterodimerization skew variants L368D/K370S and the second variant Fc domain includes heterodimerization skew variants S364K/E357Q; each of the first and second variant Fc domains include ablation variants E233P/L234V/L235A/G236_/S267K; and the constant domain (CH1-hinge-CH2-CH3) of the first monomer includes pI variants N208D/Q295E/N384D/Q418E/N421D, wherein numbering is according to EU numbering. In some embodiments, the scFv of the 2+1 mAb-scFv format antibody provided herein includes a (GKPGS)₄ charged scFv linker. In some embodiments, 2+1 mAb-scFv format antibody provided herein includes FcRn variants M428L/N434S, wherein numbering is according to EU numbering.

[0405] In some embodiments of the 2+1 mAb-scFv, the VH1 of the first and second monomer and the VL1 of the common light chain each form a PD-L1 binding domain. In some embodiments, the scFv of the second monomer is a PD-L1 binding domain.

[0406] In some embodiments, the PD-L1 binding domain is one of the following PD-L1 binding domains or a variant thereof: 2G4[PDL1]_H1L1, 2G4[PDL1]_H1.12_L1.24, 2G4[PDL1]_H1.12_L1.66, 2G4[PDL1]_H1.12_L1.68, 2G4[PDL1]_H1.12_L1.14, 2G4[PDL1]_H1.4_L1.23, 2G4[PDL1]_H1.4_L1.24, 2G4[PDL1]_H1.9_L1, 2G4[PDL1]_H1.62_L1.63, 2G4[PDL1]_H1.6_L1.3, 2G4[PDL1]_H1.61_L1.61, 2G4[PDL1]_H1.60_L1.60, 2G4[PDL1]_H1.59_L1.60, 2G4[PDL1]_H1.14_L1.26, 2G4[PDL1]_H1_L1.27, 2G4[PDL1]_H1.8_L1.26, 2G4[PDL1]_H1_L1.25, 2G4[PDL1]_H1.10_L1.23, 2G4[PDL1]_H1.1_L1.1, 2G4[PDL1]_H1_L1.29 (FIGS. 28-31 and the Sequence Listing).

[0407] In some embodiments of the 1+1 Fab-scFv-Fc format, the PD-L1 binding domain has a variable heavy domain (VH) selected from the group consisting of: SEQ ID NO:1079, SEQ ID NO:1042, SEQ ID NO:1055, SEQ ID NO:1059, SEQ ID NO:1063, SEQ ID NO: 1067, SEQ ID NO: 1071, SEQ ID NO: 1075, SEQ ID NO:1083, SEQ ID NO:1087, SEQ ID NO:1091, SEQ ID NO:1095, SEQ ID NO:1099, and SEQ ID NOs:736-797 or a variant thereof, and a variable light domain (VL) selected from the group consisting of: SEQ ID NO: 1111, SEQ ID NO:1046, SEQ ID NO:1103, SEQ ID NO:1107, SEQ ID NO:1115, SEQ ID NO:1119, SEQ ID NO:1123, SEQ ID NO:1127, SEQ ID NO:1131, SEQ ID NO:1135, SEQ ID NO:1139, SEQ ID NO:1143, SEQ ID NO:1147, SEQ ID NO:1151, SEQ ID NO:1155, and SEQ ID NOs:798-868 or a variant thereof. In some embodiments, the VH and VL of the PD-L1 binding domain are selected from the group consisting of: a VH having an amino acid sequence of SEQ ID NO: 1183 and a VL having an amino acid sequence of SEQ ID NO: 1187; a VH having an amino acid of SEQ ID NO:1042 and a VL having an amino acid sequence of SEQ ID NO:1047; a VH having an amino acid sequence of SEQ ID NO:1159 and a VL having an amino acid sequence of SEQ ID NO: 1163; a VH having an amino acid sequence of SEQ ID NO: 1167 and a VL having an amino acid sequence of SEQ ID NO:1171; a VH having an amino acid sequence of SEQ ID NO: 1175 and a VL having an amino acid sequence of SEQ ID NO: 1179; a VH having an amino acid sequence of SEQ ID NO: 1191 and a VL having an amino acid sequence of SEQ ID NO: 1195; a VH having an amino acid sequence of SEQ ID NO: 1199 and a VL having an amino acid sequence of SEQ ID NO:1203; a VH having an amino acid sequence of SEQ ID NO:1207 and a VL having an amino acid sequence of SEQ ID NO:1211; a VH having an amino acid sequence of SEQ ID NO:1215 and a VL having an amino acid sequence of SEQ ID NO:1219; a VH having an amino acid sequence of SEQ ID NO:1223 and a VL having an amino acid sequence of SEQ ID NO:1227; a VH having an amino acid sequence of SEQ ID NO:1231 and a VL having an amino acid sequence of SEQ ID NO:1235; a VH having an amino acid sequence of SEQ ID NO:1239 and a VL having an amino acid sequence of SEQ ID NO:1243; a VH having an amino acid sequence of SEQ ID NO:1247 and a VL having an amino acid sequence of SEQ ID NO:1251; a VH having an amino acid sequence of SEQ ID NO:1255 and a VL having an amino acid sequence of SEQ ID NO:1259; a VH having an amino acid sequence of SEQ ID NO:1263 and a VL having an amino acid sequence of SEQ ID NO:1267; a VH having an amino acid sequence of SEQ ID NO:1271 and a VL having an amino acid sequence of SEQ ID NO:1275; a VH having an amino acid sequence of SEQ ID NO:1279 and a VL having an amino acid sequence of SEQ ID NO:1283; a VH having an amino acid sequence of SEQ ID NO:1287 and a VL having an amino acid sequence of SEQ ID NO:1291; a VH having an amino acid sequence of SEQ ID NO:1295 and a VL having an amino acid sequence of SEQ ID NO:1299; and a VH having an amino acid sequence of SEQ ID NO:1303 and a VL having an amino acid sequence of SEQ ID NO:1307.

[0408] In some embodiments, the PD-L1 binding domain is selected from one of the following PD-L1 binding domains: 2.14H9 OPT, atezolizumab, avelumab, 12A4, 3G10, 10A5, h3D10 Var1, h3D10 Var2, h3D10 Var3, h3D10 Var4, h3D10 Var5, h3D10 Var6, h3D10 Var7, h3D10 Var8, h3D10 Var9, h3D10 Var10, h3D10 Var11, h3D10 Var12, h3D10 Var13, h3D10 Var14, Antibody A, C5H9v2, Humanized 29E.2A3, 1B9, 4H1, mAb-42, BAP058-03, BAP058-04, BAP058-06, BAP058-07, BAP058-11, BAP058-13, H6, RC5, SH1A1Q, SH1B3, SH1D1, SH1D2, SH1D12, SH1E1, SH1G9, SH1E6, SH1A2, SH1B1, H6B1L, H6A1, H6B1, H6B2, G12, RSA1, RA3, SH1E2, SH1E4, SH1B11, SH1C8, H1H9364P2, H1H9373P2, H1H8314N, PDL1.3.1 or a variant thereof.

[0409] In some embodiments, the VH and VL of the PD-L1 binding domain is selected from the following VH and VLs, respectively: SEQ ID NOs:89 and 93, SEQ ID NOs:97 and 101, SEQ ID NOs:105 and 109, SEQ ID NOs:113 and 117, SEQ ID NOs:121 and 125, SEQ ID NOs:129 and 133, SEQ ID NOs:137 and 141, SEQ ID NOs:145 and 149, SEQ ID NOs:153 and 157, SEQ ID NOs:161 and 165, SEQ ID NOs:169 and 173, SEQ ID NOs:177 and 181, SEQ ID NOs:185 and 189, SEQ ID NOs:193 and 197, SEQ ID NOs:201 and 205, SEQ ID NOs:209 and 213, SEQ ID NOs:217 and 221, SEQ ID NOs:225 and 229, SEQ ID NOs:233 and 237, SEQ ID NOs:241 and 245, SEQ ID NOs:249 and 253, SEQ ID NOs:257 and 261, SEQ ID NOs:265 and 269, SEQ ID NOs:273 and 277, SEQ ID NOs:281 and 285, SEQ ID NOs:289 and 293, SEQ ID NOs:297 and 301, SEQ ID NOs:305 and 309, SEQ ID NOs:313 and 317, SEQ ID NOs:321 and 325, SEQ ID NOs:329 and 333, SEQ ID NOs:337 and 341, SEQ ID NOs:345 and 349, SEQ ID NOs:353 and 357, SEQ ID NOs:361 and 365, SEQ ID NOs:369 and 373, SEQ ID NOs:374 and 381, SEQ ID NOs:385 and 389, SEQ ID NOs:393 and 397, SEQ ID NOs:401 and 405, SEQ ID NOs:409 and 413, SEQ ID NOs:417 and 421, SEQ ID NOs:425 and 429, SEQ ID NOs:433 and 437, SEQ ID NOs:441 and 445, SEQ ID NOs:449 and 453, SEQ ID NOs:457 and 461, SEQ ID NOs:465 and 469, SEQ ID NOs:473 and 477, SEQ ID NOs:481 and 485, SEQ ID NOs:489 and 493, SEQ ID NOs:497 and 501, SEQ ID NOs:504 and 508, SEQ ID NOs:512 and 516, SEQ ID NOs:520 and 524, SEQ ID NOs:528 and 534, SEQ ID NOs:537 and 541, SEQ ID NOs:545 and 549, SEQ ID NOs:553 and 557 or variants thereof.

[0410] In some embodiments, the 2+1 mAb-scFv format antibody is a bispecific antibody that binds PD-L1 and CD28. In some embodiments, the scFv of the second monomer is a CD28 binding domain and the VH1 of the first and second monomer and the VL1 of the common light chain each form PD-L1 binding domains. In some embodiments, the scFv of the second monomer is a PD-L1 binding domain and the VH1 of the first and second monomer and the VL1 of the common light chain each form CD28 binding domains.

[0411] Any suitable CD28 binding domain can be included in subject 2+1 mAb-scFv format antibody, including any of the CD28 binding domains provided herein. In some embodiments, the CD28 binding domain is one of the following CD28 binding domains or a variant thereof: 1A7[CD28]_H1L1, 1A7[CD28]_H1.14L1, 1A7[CD28]_L1H1.14, 1A7[CD28]_H1.1L1, 1A7[CD28]_H1L1.71, 1A7[CD28]_H1.14L1.71, 1A7[CD28]_L1.71H1.14, 1A7[CD28]_H1.1L1.71, and HuTN228[CD28]_H1L1 (FIGS. 18-23 and the Sequence Listing).

[0412] In some embodiments of the 2+1 mAb-scFv format antibody, the CD28 binding domain has a variable heavy domain (VH) selected from the group consisting of: SEQ ID NO:998, SEQ ID NO:984, SEQ ID NO:994 and SEQ ID NOs:561-629 or a variant thereof, and a variable light domain (VL) selected from the group consisting of: SEQ ID NO:1002, SEQ ID NO:984, and SEQ ID NOs:630-735 or a variant thereof. In some embodiments, the VH and VL of the CD28 binding domain are selected from the group consisting of: a VH having an amino acid sequence of SEQ ID NO:1030 and a VL having an amino acid sequence of SEQ ID NO:1034; a VH having an amino acid sequence of SEQ ID NO:1006 and a VL having an amino acid sequence of SEQ ID NO:1010; a VH having an amino acid sequence of SEQ ID NO:1014 and a VL having an amino acid sequence of SEQ ID NO:1018; and a VH having an amino acid sequence of SEQ ID NO:1022 and a VL having an amino acid sequence of SEQ ID NO:1026.

[0413] In exemplary embodiments, the CD28 binding domain includes a 1A7[CD28]_H1.14 variable heavy domain. In some embodiments, the CD28 binding domain includes a 1A7[CD28]_H1.14 variable heavy domain or variant thereof and a light variable domain of any of the CD28 binding domains provided herein. In exemplary embodiments, the CD28 binding domain is 1A7[CD28]_H1.14L1.71 or a variant thereof.

[0414] In some embodiments, the CD28 binding domain is selected from one of the following CD28 binding domains CD28.3[CD28]_H0L0, hCD28.3[CD28]_H1L1, 5.11A1[CD28]_H0L0, TGN1412_H1L1, 341VL34[CD28]_H1L1, 341VL36[CD28]_H1L1, 281VL4[CD28]_H1L1, HuTN228[CD28]_H1L1, PV1[CD28]_H0L0, m9.3[CD28]_H0L0, hu9.3[CD28]_H1L1 or a variant thereof.

[0415] In some embodiments, the VH and VL of the CD28 binding domain is selected from the following VH and VLs, respectively: SEQ ID NOs:1 and 5, SEQ ID NOs:9 and 13, SEQ ID NOs:17 and 21, SEQ ID NOs:25 and 29, SEQ ID NOs:33 and 37, SEQ ID NOs:41 and 46, SEQ ID NOs:49 and 53, SEQ ID NOs:57 and 61, SEQ ID NOs:65 and 69, SEQ ID NOs:73 and 77, and SEQ ID NOs:81 and 85. or variants thereof.

[0416] Any suitable PD-L1 binding domain can be included in the subject anti-PD-L1×anti-CD28 2+1 mAb-scFv format antibody, including any of the PD-L1 antigen binding domains provided herein (see, e.g., FIGS. 28-31 and the Sequence Listing). In exemplary embodiments, the PD-L1 binding domain has a VH with an amino acid sequence of SEQ ID NO:1183 and a VL with an amino acid sequence of SEQ ID NO:1187. In exemplary embodiments, the PD-L1 binding domain has a VH with an amino acid sequence of SEQ ID NO:1042 and a VL with an amino acid sequence of SEQ ID NO:1046. In exemplary embodiments, the PD-L1 binding domain has a VH with an amino acid sequence of SEQ ID NO:1159 and a VL with an amino acid sequence of SEQ ID NO:1163.

[0417] FIGS. 10-11 show some exemplary Fe domain sequences that are useful with the 2+1 mAb-scFv format. The “monomer 1” sequences depicted in FIG. 10 typically refer to the Fc domain of the “Fab-Fc heavy chain” and the “monomer 2” sequences refer to the Fc domain of the “Fab-Fc-scFv” heavy chain.” In addition, FIGS. 12-14 provides exemplary CH1 (optionally including hinge or half-hinge domains) that can be used in either the “Fab-Fc heavy chain” monomer or the “Fab-Fc-scFv” heavy chain.” FIG. 15 provides exemplary hinge domains that may be used in either the “Fab-Fc heavy chain” monomer or the “Fab-Fc-scFv” heavy chain.” Further, FIG. 16 provides useful CL sequences that can be used with this format.

[0418] An exemplary anti-PD-L1×anti-CD28×antibody in the 2+1 mAb-scFv format is depicted in FIG. 37.

[0419] 6. Monospecific, Monoclonal Antibodies

[0420] As will be appreciated by those in the art, the novel Fv sequences outlined herein can also be used in both monospecific antibodies (e.g., “traditional monoclonal antibodies”) or non-heterodimeric bispecific formats. Accordingly, the present invention provides monoclonal (monospecific) antibodies comprising the 6 CDRs and/or the vh and vl sequences from the figures, generally with IgG1, IgG2, IgG3 or IgG4 constant regions, with IgG1, IgG2 and IgG4 (including IgG4 constant regions comprising a S228P amino acid substitution) finding particular use in some embodiments. That is, any sequence herein with a “H_L” designation can be linked to the constant region of a human IgG1 antibody.

[0421] In some embodiments, the monospecific antibody is an anti-CD28 monospecific antibody. In certain embodiments, the monospecific anti-CD28 antibody includes the 6 CDRs of any of the following CD28 antigen binding domains or a variant thereof: 1A7[CD28]_H1L1, 1A7[CD28]_H1.14L1, 1A7[CD28]_L1H1.14, 1A7[CD28]_H1.1L1, 1A7[CD28]_H1L1.71, 1A7[CD28]_H1.14L1.71, 1A7[CD28]_L1.71H1.14, 1A7[CD28]_H1.1L1.71, and HuTN228[CD28]_H1L1 (FIGS. 18-23 and the Sequence Listing). In some embodiments, the monospecific anti-CD28 antibody includes the variable heavy domain and variable light domain of any of the CD28 antigen binding domains or a variant thereof: 1A7[CD28]_H1L1, 1A7[CD28]_H1.14L1, 1A7[CD28]_L1H1.14, 1A7[CD28]_H1.1L1, 1A7[CD28]_H1L1.71, 1A7[CD28]_H1.14L1.71, 1A7[CD28]_L1.71H1.14, 1A7[CD28]_H1.1L1.71, and HuTN228[CD28]_H1L1 (FIGS. 18-23 and the Sequence Listing). In some embodiments of the monospecific antibody, the CD28 binding domain has a variable heavy domain (VH) selected from the group consisting of: SEQ ID NO:998, SEQ ID NO:984, SEQ ID NO:994 and SEQ ID NOs:561-629 or a variant thereof, and a variable light domain (VL) selected from the group consisting of: SEQ ID NO:1002, SEQ ID NO:984, and SEQ ID NOs:630-735 or a variant thereof. In some embodiments, the VH and VL of the CD28 binding domain are selected from the group consisting of: a VH having an amino acid sequence of SEQ ID NO:1030 and a VL having an amino acid sequence of SEQ ID NO:1034; a VH having an amino acid sequence of SEQ ID NO:1006 and a VL having an amino acid sequence of SEQ ID NO:1010; a VH having an amino acid sequence of SEQ ID NO:1014 and a VL having an amino acid sequence of SEQ ID NO:1018; and a VH having an amino acid sequence of SEQ ID NO:1022 and a VL having an amino acid sequence of SEQ ID NO:1026.

[0422] In some embodiments, the monospecific antibody is an anti-PD-L1 monospecific antibody. In certain embodiments, the monospecific anti-PD-L1 antibody includes the 6 CDRs of any one of the following PD-L1 ABDs or a variant thereof: 2G4[PDL1]_H1L1, 2G4[PDL1]_H1.12_L1.24, 2G4[PDL1]_H1.12_L1.66, 2G4[PDL1]_H1.12_L1.68, 2G4[PDL1]_H1.12_L1.14, 2G4[PDL1]_H1.4_L1.23, 2G4[PDL1]_H1.4_L1.24, 2G4[PDL1]_H1.9_L1, 2G4[PDL1]_H1.62_L1.63, 2G4[PDL1]_H1.6_L1.3, 2G4[PDL1]_H1.61_L1.61, 2G4[PDL1]_H1.60_L1.60, 2G4[PDL1]_H1.59_L1.60, 2G4[PDL1]_H1.14_L1.26, 2G4[PDL1]_H1_L1.27, 2G4[PDL1]_H1.8_L1.26, 2G4[PDL1]_H1_L1.25, 2G4[PDL1]_H1.10_L1.23, 2G4[PDL1]_H1.1_L1.1, 2G4[PDL1]_H1_L1.29 (FIGS. 28-31 and the Sequence Listing). In some embodiments, the monospecific anti-PD-L1 antibody includes the variable heavy domain and variable light domain of any one of the following PD-L1 ABDs or a variant thereof: 2G4[PDL1]_H1L1, 2G4[PDL1]_H1.12_L1.24, 2G4[PDL1]_H1.12_L1.66, 2G4[PDL1]_H1.12_L1.68, 2G4[PDL1]_H1.12_L1.14, 2G4[PDL1]_H1.4_L1.23, 2G4[PDL1]_H1.4_L1.24, 2G4[PDL1]_H1.9_L1, 2G4[PDL1]_H1.62_L1.63, 2G4[PDL1]_H1.6_L1.3, 2G4[PDL1]_H1.61_L1.61, 2G4[PDL1]_H1.60_L1.60, 2G4[PDL1]_H1.59_L1.60, 2G4[PDL1]_H1.14_L1.26, 2G4[PDL1]_H1_L1.27, 2G4[PDL1]_H1.8_L1.26, 2G4[PDL1]_H1_L1.25, 2G4[PDL1]_H1.10_L1.23, 2G4[PDL1]_H1.1_L1.1, 2G4[PDL1]_H1_L1.29 (FIGS. 28-31 and the Sequence Listing).

[0423] In some embodiments of the monospecific anti-PD-L1 antibody, the PD-L1 binding domain(s) has a variable heavy domain (VH) selected from the group consisting of: SEQ ID NO:1079, SEQ ID NO:1042, SEQ ID NO:1055, SEQ ID NO:1059, SEQ ID NO:1063, SEQ ID NO: 1067, SEQ ID NO: 1071, SEQ ID NO: 1075, SEQ ID NO:1083, SEQ ID NO:1087, SEQ ID NO:1091, SEQ ID NO:1095, SEQ ID NO:1099, and SEQ ID NOs:736-797 or a variant thereof, and a variable light domain (VL) selected from the group consisting of: SEQ ID NO:1111, SEQ ID NO:1046, SEQ ID NO:1103, SEQ ID NO:1107, SEQ ID NO:1115, SEQ ID NO:1119, SEQ ID NO:1123, SEQ ID NO:1127, SEQ ID NO:1131, SEQ ID NO:1135, SEQ ID NO:1139, SEQ ID NO:1143, SEQ ID NO:1147, SEQ ID NO:1151, SEQ ID NO:1155, and SEQ ID NOs:798-868 or a variant thereof.

[0424] In some embodiments, the VH and VL of the PD-L1 binding domain is selected from the group consisting of: a VH having an amino acid sequence of SEQ ID NO: 1183 and a VL having an amino acid sequence of SEQ ID NO:1187; a VH having an amino acid of SEQ ID NO:1042 and a VL having an amino acid sequence of SEQ ID NO:1047; a VH having an amino acid sequence of SEQ ID NO: 1159 and a VL having an amino acid sequence of SEQ ID NO: 1163; a VH having an amino acid sequence of SEQ ID NO: 1167 and a VL having an amino acid sequence of SEQ ID NO:1171; a VH having an amino acid sequence of SEQ ID NO: 1175 and a VL having an amino acid sequence of SEQ ID NO: 1179; a VH having an amino acid sequence of SEQ ID NO: 1191 and a VL having an amino acid sequence of SEQ ID NO: 1195; a VH having an amino acid sequence of SEQ ID NO: 1199 and a VL having an amino acid sequence of SEQ ID NO:1203; a VH having an amino acid sequence of SEQ ID NO:1207 and a VL having an amino acid sequence of SEQ ID NO:1211; a VH having an amino acid sequence of SEQ ID NO:1215 and a VL having an amino acid sequence of SEQ ID NO:1219; a VH having an amino acid sequence of SEQ ID NO:1223 and a VL having an amino acid sequence of SEQ ID NO:1227; a VH having an amino acid sequence of SEQ ID NO:1231 and a VL having an amino acid sequence of SEQ ID NO:1235; a VH having an amino acid sequence of SEQ ID NO:1239 and a VL having an amino acid sequence of SEQ ID NO:1243; a VH having an amino acid sequence of SEQ ID NO:1247 and a VL having an amino acid sequence of SEQ ID NO:1251; a VH having an amino acid sequence of SEQ ID NO:1255 and a VL having an amino acid sequence of SEQ ID NO:1259; a VH having an amino acid sequence of SEQ ID NO:1263 and a VL having an amino acid sequence of SEQ ID NO:1267; a VH having an amino acid sequence of SEQ ID NO:1271 and a VL having an amino acid sequence of SEQ ID NO:1275; a VH having an amino acid sequence of SEQ ID NO:1279 and a VL having an amino acid sequence of SEQ ID NO:1283; a VH having an amino acid sequence of SEQ ID NO:1287 and a VL having an amino acid sequence of SEQ ID NO:1291; a VH having an amino acid sequence of SEQ ID NO:1295 and a VL having an amino acid sequence of SEQ ID NO:1299; and a VH having an amino acid sequence of SEQ ID NO:1303 and a VL having an amino acid sequence of SEQ ID NO:1307.

### VI. Nucleic Acids

[0425] In another aspect, provided herein are nucleic acid compositions encoding the antigen binding domains and anti-PD-L1 and anti-CD28 antibodies provided herein (e.g., PD-L1×αCD28 bispecific antibodies).

[0426] As will be appreciated by those in the art, the nucleic acid compositions will depend on the format and scaffold of the heterodimeric protein. Thus, for example, when the format requires three amino acid sequences, such as for the 1+1 Fab-scFv-Fc, 2+1 Fab₂-scFv-Fc, and 2+1 mAb-scFv formats, three polynucleotides can be incorporated into one or more expression vectors for expression. In exemplary embodiments, each polynucleotide is incorporated into a different expression vector.

[0427] As is known in the art, the nucleic acids encoding the components of the binding domains and antibodies disclosed herein can be incorporated into expression vectors as is known in the art, and depending on the host cells used to produce the heterodimeric antibodies of the invention. Generally the nucleic acids are operably linked to any number of regulatory elements (promoters, origin of replication, selectable markers, ribosomal binding sites, inducers, etc.). The expression vectors can be extra-chromosomal or integrating vectors.

[0428] The polynucleotides and/or expression vectors of the invention are then transformed into any number of different types of host cells as is well known in the art, including mammalian, bacterial, yeast, insect and/or fungal cells, with mammalian cells (e.g., CHO cells), finding use in many embodiments.

[0429] In some embodiments, polynucleotides encoding each monomer are each contained within a single expression vector, generally under different or the same promoter controls. In embodiments of particular use in the present invention, each of these polynucleotides are contained on different expression vectors. As shown herein and in U.S. 62/025,931, hereby incorporated by reference, different vector ratios can be used to drive heterodimer formation. That is, surprisingly, while the proteins comprise first monomer: second monomer:light chains (in the case of many of the embodiments herein that have three polypeptides comprising the heterodimeric antibody) in a 1:1:2 ratio, these are not the ratios that give the best results.

[0430] The antibodies and ABDs provided herein are made by culturing host cells comprising the expression vector(s) as is well known in the art. Once produced, traditional antibody purification steps are done, including an ion exchange chromatography step. As discussed herein, having the pIs of the two monomers differ by at least 0.5 can allow separation by ion exchange chromatography or isoelectric focusing, or other methods sensitive to isoelectric point. That is, the inclusion of pI substitutions that alter the isoelectric point (pI) of each monomer so that such that each monomer has a different pI and the heterodimer also has a distinct pI, thus facilitating isoelectric purification of the “1+1 Fab-scFv-Fc” heterodimer (e.g., anionic exchange columns, cationic exchange columns). These substitutions also aid in the determination and monitoring of any contaminating dual scFv-Fc and mAb homodimers post-purification (e.g., IEF gels, cIEF, and analytical IEX columns).

### VII. Biological and Biochemical Functionality of the Anti-PD-L1×Anti-CD28 Antibodies

[0431] Generally the bispecific anti-PD-L1×anti-CD28 antibodies described herein are administered to patients with cancer (e.g., a PD-L1 associated cancer or cancer that has been shown to benefit from anti-PD-1 or anti-PD-L1 treatment), and efficacy is assessed, in a number of ways as described herein. Thus, while standard assays of efficacy can be run, such as cancer load, size of tumor, evaluation of presence or extent of metastasis, etc., immuno-oncology treatments can be assessed on the basis of immune status evaluations as well. This can be done in a number of ways, including both in vitro and in vivo assays.

[0432] A. Antibody Compositions for In Vivo Administration

[0433] Formulations of the antibodies used in accordance with the present invention are prepared for storage by mixing an antibody having the desired degree of purity with optional pharmaceutically acceptable carriers, excipients or stabilizers (Remington's Pharmaceutical Sciences 16th edition, Osol, A. Ed. [1980]), in the form of lyophilized formulations or aqueous solutions.

### VIII. Treatments

[0434] Once made, the compositions of the invention find use in a number of oncology applications, by treating cancer, generally by enhancing immune responses (e.g., T cell activation and proliferation), particularly when used with anti-cancer therapies such as anti-PD1 and anti-tumor bispecific antibodies. In some embodiments, the antibodies provided herein enhance immune responses (e.g., T cell activation and proliferation) by providing agonistic costimulation of T cells in the microenvironment of tumors expressing PD-L1.

[0435] A. Anti-CD28×Anti-TAA/Anti-TAA Bispecific Antibody

[0436] In some embodiments, the anti-PD-L1×anti-CD28 bispecific antibodies provided herein are administered with an anti-tumor bispecific antibody. In classic T cell/APC interaction, there is a first signal provided by TCR reactivity with peptide-MHC (Signal 1) and a second signal provided by CD28 crosslinking by CD80/CD86 being expressed on APCs (Signal 2) which together fully activate T cells (see FIG. 32A). In contrast, only the first signal is provided in treatment with CD3 bispecific antibodies that target a TAA (i.e., anti-CD3×anti-TAA bispecific antibodies).

[0437] Without being bound by any particular theory of operation, it is believed that the anti-PD-L1×anti-CD28 bispecific antibodies provided herein can enhance the anti-tumor response of an anti-CD3×anti-TAA bispecific antibody by providing CD28 costimulation and blockage of inhibitory PD-L1.PD-1 pathway interactions (see FIGS. 32B and 34 and Example 4B). Thus, in one aspect, provided herein are methods of methods of treating a cancer in a patient by administering the patient an anti-CD3×anti-TAA bispecific antibody and an anti-CD28×anti-PD-L1 bispecific antibody provided herein. In some embodiments, the administration of the anti-CD3×anti-TAA bispecific antibody and anti-CD28×anti-PD-L1 bispecific antibody enhances an immune response against the tumor in the patient. CD3 binding domains that can be included in the anti-CD3×anti-TAA bispecific antibodies are included in FIG. 44.

[0438] B. Administrative Modalities

[0439] The antibodies provided herein administered to a subject, in accord with known methods, such as intravenous administration as a bolus or by continuous infusion over a period of time.

[0440] C. Treatment Modalities

[0441] In the methods of the invention, therapy is used to provide a positive therapeutic response with respect to a disease or condition.

[0442] By “positive therapeutic response” is intended an improvement in the disease or condition, and/or an improvement in the symptoms associated with the disease or condition. For example, a positive therapeutic response would refer to one or more of the following improvements in the disease: (1) a reduction in the number of neoplastic cells; (2) an increase in neoplastic cell death; (3) inhibition of neoplastic cell survival; (5) inhibition (i.e., slowing to some extent, preferably halting) of tumor growth; (6) an increased patient survival rate; and (7) some relief from one or more symptoms associated with the disease or condition.

[0443] Positive therapeutic responses in any given disease or condition can be determined by standardized response criteria specific to that disease or condition. Tumor response can be assessed for changes in tumor morphology (i.e., overall tumor burden, tumor size, and the like) using screening techniques such as magnetic resonance imaging (MRI) scan, x-radiographic imaging, computed tomographic (CT) scan, bone scan imaging, endoscopy, and tumor biopsy sampling including bone marrow aspiration (BMA) and counting of tumor cells in the circulation.

[0444] In addition to these positive therapeutic responses, the subject undergoing therapy may experience the beneficial effect of an improvement in the symptoms associated with the disease.

[0445] Treatment according to the present invention includes a “therapeutically effective amount” of the medicaments used. A “therapeutically effective amount” refers to an amount effective, at dosages and for periods of time necessary, to achieve a desired therapeutic result.

[0446] A therapeutically effective amount may vary according to factors such as the disease state, age, sex, and weight of the individual, and the ability of the medicaments to elicit a desired response in the individual. A therapeutically effective amount is also one in which any toxic or detrimental effects of the antibody or antibody portion are outweighed by the therapeutically beneficial effects.

[0447] A “therapeutically effective amount” for tumor therapy may also be measured by its ability to stabilize the progression of disease. The ability of a compound to inhibit cancer may be evaluated in an animal model system predictive of efficacy in human tumors.

[0448] Alternatively, this property of a composition may be evaluated by examining the ability of the compound to inhibit cell growth or to induce apoptosis by in vitro assays known to the skilled practitioner. A therapeutically effective amount of a therapeutic compound may decrease tumor size, or otherwise ameliorate symptoms in a subject. One of ordinary skill in the art would be able to determine such amounts based on such factors as the subject's size, the severity of the subject's symptoms, and the particular composition or route of administration selected.

[0449] Dosage regimens are adjusted to provide the optimum desired response (e.g., a therapeutic response). For example, a single bolus may be administered, several divided doses may be administered over time or the dose may be proportionally reduced or increased as indicated by the exigencies of the therapeutic situation. Parenteral compositions may be formulated in dosage unit form for ease of administration and uniformity of dosage. Dosage unit form as used herein refers to physically discrete units suited as unitary dosages for the subjects to be treated; each unit contains a predetermined quantity of active compound calculated to produce the desired therapeutic effect in association with the required pharmaceutical carrier.

[0450] The specification for the dosage unit forms of the present invention are dictated by and directly dependent on (a) the unique characteristics of the active compound and the particular therapeutic effect to be achieved, and (b) the limitations inherent in the art of compounding such an active compound for the treatment of sensitivity in individuals.

[0451] The efficient dosages and the dosage regimens for the bispecific antibodies used in the present invention depend on the disease or condition to be treated and may be determined by the persons skilled in the art.

[0452] All cited references are herein expressly incorporated by reference in their entirety.

[0453] Whereas particular embodiments of the invention have been described above for purposes of illustration, it will be appreciated by those skilled in the art that numerous variations of the details may be made without departing from the invention as described in the appended claims.

### EXAMPLES

[0454] Examples are provided below to illustrate the present invention. These examples are not meant to constrain the present invention to any particular application or theory of operation. For all constant region positions discussed in the present invention, numbering is according to the EU index as in Kabat (Kabat et al., 1991, Sequences of Proteins of Immunological Interest, 5th Ed., United States Public Health Service, National Institutes of Health, Bethesda, entirely incorporated by reference). Those skilled in the art of antibodies will appreciate that this convention consists of nonsequential numbering in specific regions of an immunoglobulin sequence, enabling a normalized reference to conserved positions in immunoglobulin families. Accordingly, the positions of any given immunoglobulin as defined by the EU index will not necessarily correspond to its sequential sequence.

[0455] General and specific scientific techniques are outlined in US Publications 2015/0307629, 2014/0288275 and WO2014/145806, all of which are expressly incorporated by reference in their entirety and particularly for the techniques outlined therein.

### BACKGROUND

[0456] While checkpoint blockade immunotherapies have proven to be effective, many patients nonetheless fail to achieve a response. Engagement of T cell costimulatory receptors on TILs (e.g., CD80/CD86) with agonistic antibodies (e.g., anti-CD28 antibodies) could provide an additional positive signal capable of overcoming negative signals of immune checkpoints and may be a useful therapeutic modality to stack with checkpoint blockade.

[0457] Anti-PD-L1×anti-CD28 bispecific antibodies provided herein provide a costimulatory signal for T-cell activation against tumor cells while advantageously also block inhibitory PD-L1:PD1 pathway interactions.

### Example 1: CD28 Binding Domains

[0458] Sequences for human, mouse, and cynomolgus PD-L1 are depicted in FIG. 1 and are useful for the development of cross-reactive CD28 antigen binding domains for ease of clinical development.

### 1A: Novel CD28 Binding Domains

[0459] An approach considered to avoid the superagonism associated with TGN1412 was to generate novel CD28 binding domains having lower affinity binding to CD28 and/or binding to a different CD28 epitope than TGN1412. In one campaign to generate such novel CD28 binding domains, in-house de novo phage libraries were panned against CD28. In another campaign, rat hybridomas were used to generate additional CD28 binding domains.

[0460] 1A(a): Phage-Derived Clone 1A7

[0461] It should be noted that this phage library utilized a human germline VL with diversity introduced into the LCDR3. The amino acid sequences for exemplary phage-derived clone 1A7 are depicted in FIG. 18.

[0462] The phage-derived clones were formatted as bivalent mAbs to investigate their binding characteristics. Plasmids containing the variable heavy and variable light domains of select clones were constructed by Gibson assembly and subcloned into a pTT5 expression vector containing the coding sequence for the IgG1 constant regions (with E233P/L234V/L235A/G236del/S67K ablation variants). DNA was transfected in HEK293E for expression and resulting bivalent mAbs were purified from the supernatant using protein A chromatography.

[0463] Affinity of the phage-derived bivalent mAbs for CD28 was screened using Octet, a BioLayer Interferometry (BLI)-based method. Experimental steps for Octet generally include the following: Immobilization (capture of ligand to a biosensor); Association (dipping of ligand-coated biosensors into wells containing the analyte); and Dissociation (returning of biosensors to well containing buffer). The resulting apparent dissociation constant (K_{Dapp}) are depicted in FIG. 24 for XENP28428 (based on clone 1A7) and additional phage-derived comparators.

[0464] Binding of the phage-derived bivalent mAbs to cell-surface CD28 was investigated. Human PBMCs were incubated with indicated concentrations of XENP28428 or comparator phage-derived mAbs for 1 hour at 4° C. Cells were then then stained with Alexa Fluor® 647 AffiniPure F(ab′)₂ Fragment Goat Anti-Human IgG, Fcγ fragment specific secondary antibody (Jackson ImmunoResearch, West Grove, Pa.) for 1 hour at 4° C. and analyzed by flow cytometry. The data (FIG. 25) show that the phage-derived mAbs were able to bind human PBMCs, although with much weaker maximum binding than prior art anti-CD28 mAb HuTN228 (XENP27181, sequences for which are depicted in FIG. 23).

[0465] 1A(b): 1A7 is not Superagonistic

[0466] Potential superagonism of XENP34339 was assessed by air-drying per the Stebbings protocol (Stebbings R. et al. 2007). Air-drying of test articles was achieved by drying in a SpeedVac™ for 2 hours at room temperature. Human PBMCs were treated for 24 hours with 10 μg of air-dried XENP28428 (parental αCD28 mAb 1A7), and activity was compared to the superagonist TGN1412 (XENP29154; sequences for which are depicted in FIG. 45) or PBS control. Air-dried TGN1412 promoted IFNγ secretion from unstimulated human PBMC. In comparison, IFNγ level in PBMCs treated with air-dried XENP28428 remained similar to the negative control of PBS (data shown in FIG. 46).

[0467] 1A(c): Engineering 1A7 Affinity Variants

[0468] Towards optimization of αPDL1×αCD28 bsAbs as described in Example 5, numerous 1A7 affinity variants were developed by engineering VH variants (illustrative sequences as depicted in FIG. 19 and additional sequences depicted as SEQ ID NOs:994-1001), VL variants (illustrative sequences as depicted in FIG. 20 and additional sequences depicted as SEQ ID NOs:1002-1005), and combinations thereof (illustrative sequences for which are depicted in FIG. 21). Affinity of illustrative variants, in the context of αPDL1×αCD28 bsAbs having sequences as depicted in FIG. 22, was determined using Octet as generally described above, sensorgrams and binding affinity as depicted in FIG. 47.

[0469] 1B: Additional CD28 Binding Domains

[0470] Sequences for additional CD28 binding domains which may find use in the αPDL1×αCD28 bsAbs of the invention are depicted as SEQ ID NOs:1006-1021.

### Example 2: PDL1 Binding Domains

[0471] Sequences for human, mouse, and cynomolgus PD-L1 are depicted in FIG. 2 and are useful for the development of cross-reactive PDL1 antigen binding domains for ease of clinical development.

[0472] 2A: Novel PDL1 Binding Domains

[0473] Numerous novel PDL1 binding domains were generated by hybridoma technology through IMMUNOPRECISE®. In addition to targeting the αPDL1×αCD28 to PDL1+ cells, it was contemplated that additional blockade of PDL1:PD1 interaction would be useful. Further, for ease of clinical development, it is useful to investigate various parameters of the bispecific antibodies of the invention such as pharmacodynamics, pharmacokinetics, and toxicity in cynomolgus monkeys.

[0474] Accordingly, the novel hydridoma-derived PDL1 binding domains were screened for affinity to human and cynomolgus PDL1 as well as for their ability to block PDL1:PD1 interaction using Octet as generally described above. In particular, anti-mouse IgG biosensor was dipped into 1:3 dilution of hybridoma culture supernatant and then dipped into multiple concentrations of human or cynomolgus PDL1 antigen (to determine binding affinity) or into mixtures of PD1:PDL1 antigen (blocking antibodies will not bind the PD1:PDL1 complex). Out of 106 hybridoma-derived PDL1 binding domains investigated, only 70 were cross-reactive for human and cynomolgus PDL1. Out of those 70, only 33 were considered as complete blockers of PD1:PDL1 interaction. The remaining PDL1 binders were further characterized for ability to bind PDL1 on cells and block PDL1:PD1 interaction on cells and affinity. Finally, suitable PDL1 binding domains were humanized using string content optimization (see, e.g., U.S. Pat. No. 7,657,380, issued Feb. 2, 2010). The amino acid sequences for exemplary humanized hybridoma-derived clone 2G4 (selected based on the above filtering) are depicted in FIG. 28.

[0475] 2a(a): Comparison to Other PDL1 Binding Domains

[0476] As described above, numerous other PDL1 binding domains were identified. In a first experiment comparing anti-PDL1 clone 2G4 with the other PDL1 binding domains. anti-PDL1 mAbs were incubated with indicated concentration of huPDL1-mFc fusions. The mixture was then combined with PD-1-expressing HEK293T cells. Cells were stained with anti-mouse Fc and binding was assessed by flow cytometry, data for which are depicted in FIG. 41. The data show that anti-PDL1 clone 2G4 blocks PD1:PDL1 interaction.

[0477] In a second experiment, CD3+ T cells from 11 unique donors were treated with a constant dose of the indicated test articles in the presence of 10,000 dendritic cells. Cytokine secretion was measured using MSD assay (Meso Scale Discovery, Rockville, Md.). The data depicted in FIG. 42 show that anti-PDL1 2G4 induced greater IL-2 and IFNγ release in comparison to the partial-blocking and the non-blocking anti-PDL1 clones.

[0478] 2A(b): Engineering 2G4 Affinity Variants

[0479] Towards optimization of αPDL1×αCD28 bsAbs as described in Example 5, numerous 2G4 affinity variants were developed by engineering VH variants (illustrative sequences as depicted in FIG. 29 and additional sequences depicted as SEQ ID NOs:1055-1102), VL variants (illustrative sequences as depicted in FIG. 30 and additional sequences depicted as SEQ ID NOs:1103-1158), and combinations thereof (illustrative sequences as depicted in FIG. 31). Affinity of illustrative variants, in the context of αPDL1×αCD28 bsAbs having sequences as depicted in FIG. 28, was determined using Biacore. Experimental steps for Biacore generally included the following: Immobilization (capture of ligand onto a sensor chip); Association (flowing of various concentrations of analyte over sensor chip); and Dissociation (flowing buffer over the sensor chips) in order to determine the affinity of the test articles. A reference flow with buffer alone was also included in the method for background correction during data processing. Binding affinities and kinetic rate constants were obtained by analyzing the processed data using a 1:1 binding model. Binding affinity for human and cynomolgus PDL1 determined as such are depicted in FIG. 50.

[0480] 2B: Additional PDL1 Binding Domains

[0481] Sequences for additional PDL1 binding domains which may find use in the αPDL1×αCD28 bsAbs of the invention are depicted as SEQ ID NOs:1159-1310.

### Example 3: Engineering αPDL1×αCD28 bsAbs

[0482] As described in Example 4, in classic T cell/APC interaction, there is a first signal provided by TCR reactivity with peptide-MHC (Signal 1) and a second signal provided by CD28 crosslinking by CD80/CD86 being expressed on APCs (Signal 2) which together fully activate T cells (see FIG. 32). Further, it may be useful to stack the CD28 signal with checkpoint blockade to mitigate any checkpoint mediated repression of the added CD28 signal (FIG. 33). αPDL1×αCD28 may provide the Signal 2 while advantageously further enabling blockade of PDL1:PD1 interaction (FIG. 34).

[0483] Accordingly, αPDL1×αCD28 bsAbs were engineered and produced. A number of formats were conceived, illustrative formats for which are outlined below and in FIGS. 26-27. It should be noted that in each case, the CD28 bispecific antibodies are monovalent for CD28 and incorporate Fc variants engineered to ablate FcγR binding (such as those depicted in FIG. 5) to avoid potential superagonism.

[0484] 3A: 1+1 Fab-scFv-Fc Format

[0485] One format utilizing Fab domains and scFv is the 1+1 Fab-scFv-Fc format (depicted schematically in FIG. 27A) which comprises a first monomer comprising a single-chain Fv (“scFv”) with a first antigen binding specificity covalently attached to a first heterodimeric Fc domain, a second monomer comprising a heavy chain variable region (VH) covalently attached to a complementary second heterodimeric Fc domain, and a light chain (LC) transfected separately so that a Fab domain having a second antigen binding specificity is formed with the variable heavy domain. Sequences for illustrative αPDL1×αCD28 bsAbs (based on binding domains as described in Examples 1 and 2) in the 1+1 Fab-scFv-Fc format are depicted in FIG. 35.

[0486] 3B: 2+1 Fab2-scFv-Fc Format

[0487] Another such format is the 2+1 Fab2-scFv-Fc format (depicted schematically in FIG. 27B) which comprises a first monomer comprising a VH domain covalently attached to an scFv (having a first antigen binding specificity) covalently attached to a first heterodimeric Fc domain, a second monomer comprising a VH domain covalently attached to a complementary second heterodimeric Fc domain, and a LC transfected separately so that Fab domains having a second antigen binding specificity are formed with the VH domains. Sequences for illustrative αPDL1×αCD28 bsAbs (based on binding domains as described in Examples 1 and 2) in the 2+1 Fab2-scFv-Fc format are depicted in FIG. 36.

[0488] 3C: 2+1 mAb-scFv Format

[0489] An additional format utilizing Fab domains and scFv is the 2+1 mAb-scFv format (depicted schematically in FIG. 27E) which comprises a first monomer comprising a VH domain covalently attached to a first heterodimeric Fc domain covalently attached to an scFv (having a first antigen binding specificity), a second monomer comprising a VH domain covalently attached to a complementary second heterodimeric Fc domain, and a LC transfected separately so that Fab domains having a second antigen specificity are formed with the VH domains. Sequences for illustrative αPDL1×αCD28 bsAbs (based on binding domains as described here) in the 2+1 mAb-scFv format are depicted in FIG. 37.

### Example 4: Characterizing Prototype αPDL1×αCD28 bsAbs

[0490] 4A: αPDL1×αCD28 bsAbs Induce Expansion of T Cells

[0491] MDA-MB-231 (PDL1+) cancer cells were ectopically loaded with pp65-derived NLV-peptide for 24 hours. The following day, T cells from a CMV+ donor were added along with a monovalent αPDL1 antibody XENP24118 (based on avelumab; sequences depicted in FIG. 38) or αPDL1×αCD28 XENP34963. Expansion of CMV+ T cells was measured with an NLV-specific tetramer. The data as depicted in FIG. 39 show that the αPDL1×αCD28 bsAb XENP36233 significantly enhanced T cell expansion in comparison to PDL1 blockade alone.

[0492] 4B: αPDL1×αCD28 bsAbs Block PD-1:PD-L1 Interaction During T-Cell:Cancer Cell Interactions

[0493] Jurkat-PD1 cells were treated with a dose titration of the indicated test articles (i.e. αPDL1×αCD28 bsAbs containing αPDL1 clone 2G4, a partial-blocking αPDL1 arm, or a non-blocking αPDL1 arm) in the presence of CHO-PDL1-CD80-αCD3 and CHO-PDL1-αCD3 cells. 6 hours post Jurkat-PD1 seeding, luciferase activity was measured as an indicator of PD-1 blockade. The data as depicted in FIG. 51 show that XENP36233 having blocking αPDL1 clone 2G4 induced strong luciferase activity in comparison to αPDL1×αCD28 bsAbs having partial blocking or non-blocking αPDL1 arms.

[0494] 4C: αPDL1×αCD28 bsAbs are More Active on Cells Having Higher PDL1 Antigen Density

[0495] PDL1^{null} MC38 cells were transfected to express low or medium levels of PDL1 antigen (respectively 40K and 59K antigen density). Parental, PDL1^{low}, and PDL1^{med} MC38 clones were treated with a dose titration of XENP36233. Secondary A647-conjugated anti-human Fc antibody was used to detect the bsAbs by flow cytometry, data for which are depicted in FIG. 52. The data show that binding correlates to PDL1 antigen density.

[0496] Next, PDL1^{null} HEK293T cells were transfected to express medium or high levels of PDL1 antigen. 10,000 CD3+ T cells were treated with a dose titration of XENP36233 and 1 μg/mL αB7H3×αCD3 in the presence of 10,000 PDL1-HEK293T density series. 1 day post T cell seeding, IL-2 secretion was measured using MSD assay. The data as depicted in FIG. 53 show that αPDL1×αCD28 bsAbs are more active on cells having higher PDL1 antigen density.

[0497] 4D: αPDL1×αCD28 bsAbs Enhance Activity of CD3 Bispecific Antibodies

[0498] In a first experiment, induction of cytokine (IL-2 and IFNγ) release and CD3+ T cell expansion by αPDL1×αCD28 bsAbs in combination with CD3 bispecific antibodies was assessed using Incucyte® Live-Cell Analysis system (Essen BioScience, Ann Arbor, Mich.). MDA-MB-231 cancer cells and T cells were mixed with 1 μg/ml of an illustrative αB7H3×αCD3 bispecific and indicated concentrations of αPDL1 mAb XENP24118 or αPDL1×αCD28 bsAb XENP34963. Cancer cell growth was assayed over time with Incucyte, while cytokine secretion was measured using MSD assay (Meso Scale Discovery, Rockville, Md.) and T cell expansion was measured using flow cytometry. The data as depicted in FIG. 40 show that αPDL1×αCD28 bsAb synergizes with CD3 bispecific antibodies to induce T-cell activation.

[0499] In another experiment, cell kill at a 1:1 effector:target ratio was assessed using xCELLigence Real Time Cell Analysis instrument (ACEA Biosciences, San Diego, Calif.). 1,250 LNCaP cancer cells were first seeded. After 48 hours, freshly enriched CD3+ T cells at an effector:target of 1:1 were added along with antibodies (αPSMA×αCD3 XENP32220 alone or XENP32220 in combination with XENP36233; sequences for XENP32220 are depicted in FIG. 41) at a constant dose. Cell kill was recorded for 10 days post T cell seeding. In this experiment, the data as depicted in FIG. 42 show that XENP32220 alone was able to enhance cell kill in comparison to incubation of cancer and T cells alone; however, addition of PDL1×CD28 overcomes cancer cell resistance to the CD3 bispecific and further enhances cell kill.

[0500] 4E: αPDL1×αCD28 bsAbs do not Synergize with CD3 bsAbs on PDL1 Negative Cell Lines

[0501] CD3+ T cells were incubated with 22Rv1 (PDL1^{null}) at 10:1 and 1:1 E:T ratios with αB7H3×αCD3 alone or αB7H3×αCD3 in combination with XENP36233. Cell kill was recorded using xCELLigence for 7 days post T cell seeding. The data as depicted in FIG. 54 show that αPDL1×αCD28 bsAb XENP36233 did not synergize with the αB7H3×αCD3 to enhance cell kill of the PDL1 negative 22Rv1 cell line.

[0502] 4F: αPDL1×αCD28 Enhances Anti-Tumor Activity In Vivo

[0503] MC38 cancer cells stably expressing human PDL1 antigen were subcutaneously inoculated into human CD28 knock-in mice. When tumors were palpable (Day 0), mice were intraperitoneally treated weekly with either 5 mg/kg bivalent αPDL1 antibody based on avelumab (XENP24118), 6 mg/kg αPDL1×αCD28 XENP34961 (2+1 mAb-scFv format), or 8.3 mg/kg αPDL1×αCD28 XENP34963 (1+1 Fab-scFv-Fc format). Mice were additionally dosed on Days 3, 7, 10, 14, and 17. Tumor volumes were monitored by caliper measurements, data for which are shown (days post 1^{st} dose) in FIG. 43. The data show that although PDL1 blockade inhibited tumor growth, the αPDL1×αCD28 bsAbs as a single-agents significantly enhanced anti-tumor activity.

[0504] 4G: αPDL1×αCD28 was Well Tolerated in Cynomolgus Monkeys and Exhibited Favorable Pharmacokinetics

[0505] Cynomolgus monkeys were dosed with XENP36764 (sequences for which are depicted in FIG. 35; XENP36233 further engineered with M428L/N434S for enhanced half-life). The data as depicted in FIG. 55 show that the αPDL1×αCD28 exhibited favorable pharmacokinetics. Additionally, the bsAb was well tolerated (data not shown).

### Example 5: Optimizing αPDL1×αCD28 bsAbs

[0506] 5A: Mechanism-Based PK/PD Modeling Suggests Avenues for Tuning CD28 and PDL1 Binding Affinities

[0507] Surface expression of PD-L1 is low on tumors may limit synapse engagement and presents the problem of how to obtain optimal cross-linking of CD28 with a bispecific. With this background, computer modeling was used to assist engineering of optimized αPDL1×αCD28 bsAbs by finding the best balance of CD28 and PDL1 affinities to achieve low antigen density targeting. A mechanism-based model was developed using experimental data (from scientific literature and in-house generated) and the following assumptions (schematically depicted in FIG. 56): three well-mixed compartments (central, peripheral, and tumor); all the compartments contain both T cells and PDL1 expressing cells; free drug transport between all compartments; non-specific clearance of the drug occurs in all compartments with the same order rate; soluble target for CD28 and PDL1 are low affinity and therefore not included; drug-bound receptor has the same internalization rate as the free receptor; cross-linking CD28:drug_PD-L1 trimer is assumed to internalize with either target; and cross-linking CD28:drug_PD-L1 trimer is assumed to internalize at the rate of faster receptor. As depicted in FIG. 57, the model predicted intratumoral T cell costimulatory activity and consistent PDL1 blockade; linear PK at dose levels consistent with typical checkpoint inhibitor regimens; trimer formation in the tumor indicating costimulation; and consistent blockade of PDL1.

[0508] Notably in view of low surface expression of PDL1 on tumors, the simulations suggested that CD28 affinity must be enhanced (from 560 nM to 58 nM) and that PDL1 affinity must be enhanced (from 2.4 nM to 0.1 nM).

[0509] 5B: Tuning CD28 Binding Affinity

[0510] Based on the above suggestion, αCD28 clone 1A7 affinity variants were engineered as described in Example 1A(c) and paired with WT αPDL1 clone 2G4.

[0511] 5B(a): Increasing CD28 Affinity Leads to More Potent and Efficacious TL-2 Secretion

[0512] In a first experiment investigating the effect of enhanced CD28 binding affinity, MDA-MB-231 or DU145 cancer were incubated with CD3+ T cells at an E:T ratio of 10:1, 1 μg/mL αB7H3×αCD3, and titrated doses of the indicated αPDL1×αCD28 test articles having the following range of CD28 binding affinities: 37 nM (1A7_L1.71_H1.14 in XENP37561); 36 nM (1A7_H1.14_L1.71 in XENP37261); 96 nM (1A7_H1.1_L1.71 in XENP37560); 180 nM (1A7_H1_L1.71 in XENP37559); 286 nM (1A7_L1_H1.14 in XENP37412); and 240 nM (1A7_H1.14_L1 in XENP36233). IL-2 secretion was assessed after 24 hours, data for which are depicted in FIG. 58. The data show that increasing CD28 affinity leads to more potent and efficacious IL-2 secretion. Notably in this set, 180 nM binding affinity for CD28 is the minimum for maximum activity (with XENP37412 and XENP36233 respectively having 286 nM and 240 nM binding affinities for CD28 demonstrating not only less potent but also less efficacious activity).

[0513] 5B(b): Increasing CD28 Affinity Increases Cytotoxicity of PDL1^{null} Cancer Cells at an E:T of 1:1

[0514] In a second experiment investigating the effect of enhanced CD28 binding affinity, LnCAP cells (PDL1^{low}) were incubated with CD3+ T cells at a low E:T ratio of 1:1 with 1 μg/ml αB7H3×αCD3 bsAb alone or in combination with 1 μg/ml of αPDL1×αCD28 bsAbs having different CD28 binding affinities (same set as in Example 5B(a)). Cytotoxicity was recorded using xCELLigence for 6 days post T cell seeding, data for which are depicted in FIG. 59. The data show that increasing CD28 affinity increases cytotoxicity of low PDL1 expressing cancer cells at a low E:T ratio of 1:1.

[0515] 5B(c): Increasing CD28 Affinity Increases Cytotoxicity of PDL1^{med} Cancer Cells at an E:T of 0.1:1

[0516] In a second experiment investigating the effect of enhanced CD28 binding affinity, DU145 cells (PDL1^{med}) were incubated with CD3+ T cells at a low E:T ratio of 0.1:1 with 1 μg/ml a1B7H3×αCD3 bsAb alone or in combination with 1 μg/ml of αPDL1×αCD28 bsAbs having different CD28 binding affinities (same set as in Example 5B(a)). Cytotoxicity was recorded using xCELLigence for 6 days post T cell seeding, data for which are depicted in FIG. 60. The data show that increasing CD28 affinity increases cytotoxicity of medium PDL1 expressing cancer cells at a very low E:T ratio of 0.1:1.

[0517] 5B(d): αPDL1×αCD28 bsAbs Tuned for Enhanced CD28 Binding Affinity are Active In Vivo

[0518] αPDL1×αCD28 bsAb XENP37261 having affinity-enhanced CD28 arm was investigated in an in vivo anti-tumor model similar to Example 4F. MC38 cancer cells stably expressing human PDL1 antigen were subcutaneously inoculated into human CD28 knock-in mice. When tumors were palpable (Day 0), mice were intraperitoneally treated weekly with either 6.6 mg/kg monovalent αPDL1 antibody based on avelumab (XENP36627) or 8.3 mg/kg αPDL1×αCD28 XENP37261. Tumor volumes were monitored by caliper measurements, data for which are shown (days post 1^{st} dose) in FIG. 61. The data show that although PDL1 blockade inhibited tumor growth, the αPDL1×αCD28 bsAb XENP37261 as a single-agent significantly enhanced anti-tumor activity.

[0519] 5C: Tuning PDL1 Binding Affinity

[0520] Next, αPDL1 clone 2G4 affinity variants were engineered as described in Example 1A(c) and paired with αCD28 clone 1A7_H1_L1.71 (180 nM CD28 arm; lower CD28 activity allows for assessment of PDL1 blockade).

[0521] 5C(a): Increasing PDL1 Affinity Promotes Cytokine Secretion

[0522] In a first experiment, DU145-NLR cells were incubated with CD3+ T cells at a E:T ratio of 1:1 and treated with 1 μg/mL αB7H3×αCD3 and dose response of the indicated αPDL1×αCD28 bsAbs having different PDL1 binding affinities. 1 day post T cell seeding, IL-2 secretion was assessed using MSD assay, data for which are depicted in FIG. 62. The data show that increased PDL1 affinity promotes IL-2 secretion.

[0523] In a second experiment, data for which are depicted in FIG. 63, XENP38514 having 0.17 nM PDL1 arm enhances T cell/APC interaction in DC:T cell mixed lymphocyte reaction as indicated by IL-2 and IFNγ release.

[0524] 5C(b): Increasing PDL1 Affinity Promotes PD1:PDL1 Blockade

[0525] In another experiment, indicated concentrations of the αPDL1×αCD28 bsAbs were incubated in the presence of huPD-L1-mFc fusion for 30 minutes at room temperature. The mixture was then combined with PD-1-expressing HEK293T cells and incubated for 1 hour at 4° C. Cells were stained with anti-mouse Fc and binding was assessed by flow cytometry, data for which are depicted in FIG. 64. The data show the αPDL1×αCD28 bsAbs can block interaction between PD1 and PDL1.

[0526] 5D: Tuning Both CD28 and PDL1 Binding Affinities

[0527] As the mechanism-based modeling suggested that affinity-enhanced CD28 binding domains should be paired with affinity-enhanced PDL1 binding domains, bsAbs having affinity-enhanced αCD28 clone 1A7 variants were paired with affinity-enhanced αPDL1 clone 2G4.

[0528] In a first experiment, PDL1 binding domains having 0.6 nM, 1 nM, and 2.6 nM binding affinities were paired with CD28 binding domains having 37 nM, 96 nM, 180 nM, and 230 nM binding affinities and investigated in an SEB-stimulated PBMC assay. PBMCs were stimulated with 110 ng/mL SEB for 2 days. 200,000 PBMCs were then seeded in the presence of 10 ng/mL SEB and αPDL1×αCD28 bsAbs at the indicated doses. TL-2 secretion was assayed after 24 hours, data for which are depicted in FIG. 65. The data suggest that high affinity PD-L1 arms such as 0.6 nM arm is optimally paired with 37 nM CD28 arm; nonetheless, high affinity PD-L1 binding overcomes the requirement for increased CD28 affinity as it also enables good activity in combination with low affinity CD28 as in XENP39365 and XENP39368.

### Example 6: Further Optimization of the αPDL1×αCD28 bsAbs

[0529] Additional optimization of other characteristics such as stability and expression are also important from a developability perspective. Although pairing high affinity PDL1 binding domain 2G4_H1.12_L1.24 with high affinity CD28 binding domain 1A7_H1.14_L1.71 as in XENP38512 enables a molecule having optimal biological activity, it turns out that XENP38512 suffered from less than ideal stability and antibody expression levels (data not shown). Accordingly, additional affinity variants were generated based on 2G4_H1.12_L1.24 by reverting or back mutating substitutions suspected to decrease stability and/or yield and/or to achieve a minimal necessary set of substitutions (relative to H1L1). Several binding domains including 2G4_H1.12_L1.14, 2G4_H1.12_L1.66, and 2G4_H1.12_L1.68 were identified which demonstrated 4.5° C. improved Tm in comparison to 2G4_H1.12_L1.24 as well as improved yield while maintaining high affinity PDL1 binding. Additionally, codon optimization was investigated.

[0530] In a further experiment, PDL1 binding domains 2G4_H1.12_L1.24 (0.17 nM), 2G4_H1.12_L1.66 (0.86 nM), 2G4_H1.12_L1.68 (0.80 nM), or 2G4_H1.12_L1.14 (0.42 nM) binding affinities were paired with CD28 binding domain having 37 nM binding affinity (1A7_H1.14_L1.71) and investigated in a reverse CAR-T experiment (wherein test articles were incubated with CD3+ enriched T cells, MDA-MB-231 transfected to express αCD3 scFv (to act as Signal 1)), and 1 μg/mL of an illustrative B7H3×CD3 bsAb. It should be noted that XENP38512 and XENP40036 have the same amino acid but were expressed from different codons. The data as depicted in FIG. 66 show that the stability/production optimized variants enabled similar IL2 induction as compared to 2G4_H1.12_L1.24 albeit with XENP40409 (non-Xtend analog of XENP40706, containing 2G4_H1.12_L1.14) inducing IL2 production most potently.

### Example 7: PDL1×CD28 bsAbs Selectively Induce Proliferation of Effector T Cells in Cynomolgus Monkeys

[0531] Cynomolgus monkeys were dosed with XENP36803 (1× dose, 4× dose, and 10× dose) or XENP36764 (4× dose, 10× dose, and 20× dose) to investigate pharmacodynamics of the PDL1×CD28 bsAbs of the invention. Data from the study show that CD28 receptor occupancy is detected up to day 14 on T cells (FIG. 67) and PDL1 receptor occupancy is detected in activated monocytes (FIG. 68). Finally as depicted in FIG. 70, it was found that the PDL1×CD28 bsAbs demonstrate cytokine-like activity in selectively inducing proliferation of effector CD4+ and CD8+ T cells, particularly CD45RA-subsets. Notably, XENP36764 in the 1+1 Fab-scFv-Fc format having monovalent binding for PDL1 induced proliferation more efficaciously than XENP36803 in the 2+1 mAb-scFv format having bivalent binding for PDL1.

What is claimed is:

1. A heterodimeric antibody comprising:
a) a first monomer comprising:
i) a scFv comprising a first variable heavy domain, an scFv linker and a first variable light domain; and
ii) a first Fe domain, wherein the scFv is covalently attached to the N-terminal of the first Fc domain using a domain linker;
b) a second monomer comprising, from N-terminus to C-terminus, a VH1-CH1-hinge-CH2-CH3, wherein VH is a first variable heavy domain and CH2-CH3 is a second Fc domain; and
c) a light chain comprising, from N-terminus to C-terminus, VL1-CL, wherein VL1 is a variable light domain and CL is a constant light domain,
wherein said VH1 and said VL1 form a first antigen binding domain (ABD) and wherein said scFv comprises a second VH domain (VH2), a scFv linker, and a second VL domain (VL2), wherein said VH2 and said VL2 form a second ABD, and wherein one of said ABDs binds CD28 and the other binds PD-L1.

2.-16. (canceled)

17. A heterodimeric antibody comprising:
a) a first monomer comprising from N- to C-terminus, VH1-CH1-first domain linker-scFv-second domain linker-CH2-CH3,
wherein VH1 is a first variable heavy domain, and CH2-CH3 is a first Fc domain;
b) a second monomer comprising from N- to C-terminus, a VH1-CH1-hinge-CH2-CH3, wherein CH2-CH3 is a second Fc domain; and
c) a light chain comprising, from N- to C-terminus, VL1-CL, wherein VL1 is a variable light domain and CL is a constant light domain,
wherein each of the VH1 domains and the first VL1 domain together form a first antigen binding domain (ABD) and the scFv comprises a second VH domain (VH2), a scFv linker, and a second VL domain (VL2), and the VH2 and the VL2 form a second ABD, wherein one of the first and second ABDs bind human CD28 and the other of the first and second ABDs binds PD-L1.

18.-34. (canceled)

35. A heterodimeric antibody comprising:
a) a first monomer comprising from N-terminus to C-terminus, VH1-CH1-hinge-CH2-CH3-domain linker-scFv,
wherein VH1 is a first variable heavy domain, and CH2-CH3 is a first Fc domain;
b) a second monomer comprising from N-terminus to C-terminus a VH1-CH1-hinge-CH2-CH3, wherein CH2-CH3 is a second Fc domain; and
c) a light chain comprising, from N-terminus to C-terminus, VL1-CL, wherein VL1 is a variable light domain and CL is a constant light domain,
wherein each of the VH1 domain and the first VL1 domain together form a first antigen binding domain (ABD) and the scFv comprises a second VH domain (VH2), a scFv linker, and a second VL domain (VL2), and the VH2 and the VL2 together form a second ABD, wherein one of the first and second ABDs bind human CD28 and the other of the first and second ABDs bind PD-L1.

36.-57. (canceled)

58. A composition comprising an anti-PD-L1 Antigen Binding Domain (ABD) comprising:
a) a variable heavy domain (VH) with an amino acid sequence selected from the group consisting of: SEQ ID NO:1079, SEQ ID NO:1042, SEQ ID NO:1055, SEQ ID NO:1059, SEQ ID NO:1063, SEQ ID NO: 1067, SEQ ID NO: 1071, SEQ ID NO: 1075, SEQ ID NO:1083, SEQ ID NO:1087, SEQ ID NO:1091, SEQ ID NO:1095, SEQ ID NO:1099, and SEQ ID NOs:736-797 or a variant thereof, and
b) variable light domain (VL) with an amino acid sequence selected from the group consisting of: SEQ ID NO:1111, SEQ ID NO:1046, SEQ ID NO:1103, SEQ ID NO:1107, SEQ ID NO:1115, SEQ ID NO:1119, SEQ ID NO:1123, SEQ ID NO:1127, SEQ ID NO:1131, SEQ ID NO:1135, SEQ ID NO:1139, SEQ ID NO:1143, SEQ ID NO:1147, SEQ ID NO:1151, SEQ ID NO:1155, and SEQ ID NOs:798-868 or a variant thereof.

59.-67. (canceled)

The application's sequence listing, which the Patent Office published only in electronic form, follows.

SEQUENCE LISTING (1591 sequences)

SEQ ID NO: 1 - protein, 121 aa, Artificial Sequence
  Description of Artificial Sequence: Synthetic polypeptide
  CD28.3[CD28]_H0L0 Variable heavy (vh) domain
EVKLQQSGAELVKPGASVRLSCKASGYTFTEYIIHWIKLRSGQGLEWIGWFYPGSNDIQYNAKFKGKATLTADKSSSTVYMELTGLTSEDSAVYFCARRDDFSGYDALPYWGQGTMVTVSS

SEQ ID NO: 2 - protein, 5 aa, Artificial Sequence
  Description of Artificial Sequence: Synthetic peptide
  CD28.3[CD28]_H0L0 vhCDR1
EYIIH

SEQ ID NO: 3 - protein, 17 aa, Artificial Sequence
  Description of Artificial Sequence: Synthetic peptide
  CD28.3[CD28]_H0L0 vhCDR2
WFYPGSNDIQYNAKFKG

SEQ ID NO: 4 - protein, 12 aa, Artificial Sequence
  Description of Artificial Sequence: Synthetic peptide
  CD28.3[CD28]_H0L0 vhCDR3
RDDFSGYDALPY

SEQ ID NO: 5 - protein, 107 aa, Artificial Sequence
  Description of Artificial Sequence: Synthetic polypeptide
  CD28.3[CD28]_H0L0 Variable light (vl) domain
DIQMTQSPASLSVSVGETVTITCRTNENIYSNLAWYQQKQGKSPQLLIYAATHLVEGVPSRFSGSGSGTQYSLKITSLQSEDFGNYYCQHFWGTPCTFGGGTKLEIK

SEQ ID NO: 6 - protein, 11 aa, Artificial Sequence
  Description of Artificial Sequence: Synthetic peptide
  CD28.3[CD28]_H0L0 vlCDR1
RTNENIYSNLA

SEQ ID NO: 7 - protein, 7 aa, Artificial Sequence
  Description of Artificial Sequence: Synthetic peptide
  CD28.3[CD28]_H0L0 vlCDR2
AATHLVE

SEQ ID NO: 8 - protein, 9 aa, Artificial Sequence
  Description of Artificial Sequence: Synthetic peptide
  CD28.3[CD28]_H0L0 vlCDR3
QHFWGTPCT

SEQ ID NO: 9 - protein, 121 aa, Artificial Sequence
  Description of Artificial Sequence: Synthetic polypeptide
  hCD28.3[CD28]_H1L1 Variable heavy (vh) domain
QVQLQQSGAELKKPGASVKVSCKASGYTFTEYIIHWIKLRSGQGLEWIGWFYPGSNDIQYNAQFKGKATLTADKSSSTVYMELTGLTPEDSAVYFCARRDDFSGYDALPYWGQGTLVTVSA

SEQ ID NO: 10 - protein, 5 aa, Artificial Sequence
  Description of Artificial Sequence: Synthetic peptide
  hCD28.3[CD28]_H1L1 vhCDR1
EYIIH

SEQ ID NO: 11 - protein, 17 aa, Artificial Sequence
  Description of Artificial Sequence: Synthetic peptide
  hCD28.3[CD28]_H1L1 vhCDR2
WFYPGSNDIQYNAQFKG

SEQ ID NO: 12 - protein, 12 aa, Artificial Sequence
  Description of Artificial Sequence: Synthetic peptide
  hCD28.3[CD28]_H1L1 vhCDR3
RDDFSGYDALPY

SEQ ID NO: 13 - protein, 107 aa, Artificial Sequence
  Description of Artificial Sequence: Synthetic polypeptide
  hCD28.3[CD28]_H1L1 Variable light (vl) domain
DIQMTQSPSSLSASVGDRVTITCKTNENIYSNLAWYQQKDGKSPQLLIYAATHLVEGVPSRFSGSGSGTQYSLTISSLQPEDFGNYYCQHFWGTPCTFGGGTKLEIK

SEQ ID NO: 14 - protein, 11 aa, Artificial Sequence
  Description of Artificial Sequence: Synthetic peptide
  hCD28.3[CD28]_H1L1 vlCDR1
KTNENIYSNLA

SEQ ID NO: 15 - protein, 7 aa, Artificial Sequence
  Description of Artificial Sequence: Synthetic peptide
  hCD28.3[CD28]_H1L1 vlCDR2
AATHLVE

SEQ ID NO: 16 - protein, 9 aa, Artificial Sequence
  Description of Artificial Sequence: Synthetic peptide
  hCD28.3[CD28]_H1L1 vlCDR3
QHFWGTPCT

SEQ ID NO: 17 - protein, 120 aa, Artificial Sequence
  Description of Artificial Sequence: Synthetic polypeptide
  5.11A1[CD28]_H0L0 Variable heavy (vh) domain
QVQLQQSGPELVKPGTSVRISCEASGYTFTSYYIHWVKQRPGQGLEWIGCIYPGNVNTNYNEKFKDKATLIVDTSSNTAYMQLSRMTSEDSAVYFCTRSHYGLDWNFDVWGAGTTVTVSS

SEQ ID NO: 18 - protein, 5 aa, Artificial Sequence
  Description of Artificial Sequence: Synthetic peptide
  5.11A1[CD28]_H0L0 vhCDR1
SYYIH

SEQ ID NO: 19 - protein, 17 aa, Artificial Sequence
  Description of Artificial Sequence: Synthetic peptide
  5.11A1[CD28]_H0L0 vhCDR2
CIYPGNVNTNYNEKFKD

SEQ ID NO: 20 - protein, 11 aa, Artificial Sequence
  Description of Artificial Sequence: Synthetic peptide
  5.11A1[CD28]_H0L0 vhCDR3
SHYGLDWNFDV

SEQ ID NO: 21 - protein, 107 aa, Artificial Sequence
  Description of Artificial Sequence: Synthetic polypeptide
  5.11A1[CD28]_H0L0 Variable light (vl) domain
DIQMNQSPSSLSASLGDTITITCHASQNIYVWLNWYQQKPGNIPKLLIYKASNLHTGVPSRFSGSGSGTGFTLTISSLQPEDIATYYCQQGQTYPYTFGGGTKLEIK

SEQ ID NO: 22 - protein, 11 aa, Artificial Sequence
  Description of Artificial Sequence: Synthetic peptide
  5.11A1[CD28]_H0L0 vlCDR1
HASQNIYVWLN

SEQ ID NO: 23 - protein, 7 aa, Artificial Sequence
  Description of Artificial Sequence: Synthetic peptide
  5.11A1[CD28]_H0L0 vlCDR2
KASNLHT

SEQ ID NO: 24 - protein, 9 aa, Artificial Sequence
  Description of Artificial Sequence: Synthetic peptide
  5.11A1[CD28]_H0L0 vlCDR3
QQGQTYPYT

SEQ ID NO: 25 - protein, 120 aa, Artificial Sequence
  Description of Artificial Sequence: Synthetic polypeptide
  TGN1412_H1L1 Variable heavy (vh) domain
QVQLVQSGAEVKKPGASVKVSCKASGYTFTSYYIHWVRQAPGQGLEWIGCIYPGNVNTNYNEKFKDRATLTVDTSISTAYMELSRLRSDDTAVYFCTRSHYGLDWNFDVWGQGTTVTVSS

SEQ ID NO: 26 - protein, 5 aa, Artificial Sequence
  Description of Artificial Sequence: Synthetic peptide
  TGN1412_H1L1 vhCDR1
SYYIH

SEQ ID NO: 27 - protein, 17 aa, Artificial Sequence
  Description of Artificial Sequence: Synthetic peptide
  TGN1412_H1L1 vhCDR2
CIYPGNVNTNYNEKFKD

SEQ ID NO: 28 - protein, 11 aa, Artificial Sequence
  Description of Artificial Sequence: Synthetic peptide
  TGN1412_H1L1 vhCDR3
SHYGLDWNFDV

SEQ ID NO: 29 - protein, 107 aa, Artificial Sequence
  Description of Artificial Sequence: Synthetic polypeptide
  TGN1412_H1L1 Variable light (vl) domain
DIQMTQSPSSLSASVGDRVTITCHASQNIYVWLNWYQQKPGKAPKLLIYKASNLHTGVPSRFSGSGSGTDFTLTISSLQPEDFATYYCQQGQTYPYTFGGGTKVEIK

SEQ ID NO: 30 - protein, 11 aa, Artificial Sequence
  Description of Artificial Sequence: Synthetic peptide
  TGN1412_H1L1 vlCDR1
HASQNIYVWLN

SEQ ID NO: 31 - protein, 7 aa, Artificial Sequence
  Description of Artificial Sequence: Synthetic peptide
  TGN1412_H1L1 vlCDR2
KASNLHT

SEQ ID NO: 32 - protein, 9 aa, Artificial Sequence
  Description of Artificial Sequence: Synthetic peptide
  TGN1412_H1L1 vlCDR3
QQGQTYPYT

SEQ ID NO: 33 - protein, 127 aa, Artificial Sequence
  Description of Artificial Sequence: Synthetic polypeptide
  341VL34[CD28]_H1L1 Variable heavy (vh) domain
EVQLVESGGGLVKPGGSLRLSCGGSGFTFNNAWMNWVRQAPGKGLEWVGRIKGKTDGGTADYAAPVKGRFTISRDYSKNTLYLQMNSLTTEDTAVYYCNTDLPYYYGSGRYSGMDVWGQGTTVTVSS

SEQ ID NO: 34 - protein, 5 aa, Artificial Sequence
  Description of Artificial Sequence: Synthetic peptide
  341VL34[CD28]_H1L1 vhCDR1
NAWMN

SEQ ID NO: 35 - protein, 19 aa, Artificial Sequence
  Description of Artificial Sequence: Synthetic peptide
  341VL34[CD28]_H1L1 vhCDR2
RIKGKTDGGTADYAAPVKG

SEQ ID NO: 36 - protein, 16 aa, Artificial Sequence
  Description of Artificial Sequence: Synthetic peptide
  341VL34[CD28]_H1L1 vhCDR3
DLPYYYGSGRYSGMDV

SEQ ID NO: 37 - protein, 104 aa, Artificial Sequence
  Description of Artificial Sequence: Synthetic polypeptide
  341VL34[CD28]_H1L1 Variable light (vl) domain
EIVLTQSPATLSLSPGERATLSCRASQSVSSYLAWYQQKPGQAPRLLIYDASNRATGIPARFSGSGSGTDFTLTISSLEPEDFAVYYCQQRSNTFGPGTKVDIK

SEQ ID NO: 38 - protein, 11 aa, Artificial Sequence
  Description of Artificial Sequence: Synthetic peptide
  341VL34[CD28]_H1L1 vlCDR1
RASQSVSSYLA

SEQ ID NO: 39 - protein, 7 aa, Artificial Sequence
  Description of Artificial Sequence: Synthetic peptide
  341VL34[CD28]_H1L1 vlCDR2
DASNRAT

SEQ ID NO: 40 - protein, 6 aa, Artificial Sequence
  Description of Artificial Sequence: Synthetic peptide
  341VL34[CD28]_H1L1 vlCDR3
QQRSNT

SEQ ID NO: 41 - protein, 127 aa, Artificial Sequence
  Description of Artificial Sequence: Synthetic polypeptide
  341VL36[CD28]_H1L1 Variable heavy (vh) domain
EVQLVESGGGLVKPGGSLRLSCGGSGFTFNNAWMNWVRQAPGKGLEWVGRIKGKTDGGTADYAAPVKGRFTISRDYSKNTLYLQMNSLKTEDTGVYYCTTYLPYYYGSERWSGMDVWGQGTTVTVSS

SEQ ID NO: 42 - protein, 5 aa, Artificial Sequence
  Description of Artificial Sequence: Synthetic peptide
  341VL36[CD28]_H1L1 vhCDR1
NAWMN

SEQ ID NO: 43 - protein, 19 aa, Artificial Sequence
  Description of Artificial Sequence: Synthetic peptide
  341VL36[CD28]_H1L1 vhCDR2
RIKGKTDGGTADYAAPVKG

SEQ ID NO: 44 - protein, 16 aa, Artificial Sequence
  Description of Artificial Sequence: Synthetic peptide
  341VL36[CD28]_H1L1 vhCDR3
YLPYYYGSERWSGMDV

SEQ ID NO: 45 - protein, 104 aa, Artificial Sequence; identical to SEQ ID NO: 37
  Description of Artificial Sequence: Synthetic polypeptide
  341VL36[CD28]_H1L1 Variable light (vl) domain

SEQ ID NO: 46 - protein, 11 aa, Artificial Sequence
  Description of Artificial Sequence: Synthetic peptide
  341VL36[CD28]_H1L1 vlCDR1
RASQSVSSYLA

SEQ ID NO: 47 - protein, 7 aa, Artificial Sequence
  Description of Artificial Sequence: Synthetic peptide
  341VL36[CD28]_H1L1 vlCDR2
DASNRAT

SEQ ID NO: 48 - protein, 6 aa, Artificial Sequence
  Description of Artificial Sequence: Synthetic peptide
  341VL36[CD28]_H1L1 vlCDR3
QQRSNT

SEQ ID NO: 49 - protein, 126 aa, Artificial Sequence
  Description of Artificial Sequence: Synthetic polypeptide
  281VL4[CD28]_H1L1 Variable heavy (vh) domain
EVQLVQSGSELKKPGSSVKVSCKASGGTSRSFAISWVRQAPGQGLEWMGGIIPIFGPANYAQKFQGRVTITADESTSTAYMELSSLRSEDTAVYYCARHAIAMGWGVITTNYFDSWGQGTMVTVSS

SEQ ID NO: 50 - protein, 5 aa, Artificial Sequence
  Description of Artificial Sequence: Synthetic peptide
  281VL4[CD28]_H1L1 vhCDR1
SFAIS

SEQ ID NO: 51 - protein, 17 aa, Artificial Sequence
  Description of Artificial Sequence: Synthetic peptide
  281VL4[CD28]_H1L1 vhCDR2
GIIPIFGPANYAQKFQG

SEQ ID NO: 52 - protein, 17 aa, Artificial Sequence
  Description of Artificial Sequence: Synthetic peptide
  281VL4[CD28]_H1L1 vhCDR3
HAIAMGWGVITTNYFDS

SEQ ID NO: 53 - protein, 108 aa, Artificial Sequence
  Description of Artificial Sequence: Synthetic polypeptide
  281VL4[CD28]_H1L1 Variable light (vl) domain
EIVLTQSPGTLSLSPGERATLSCRASQSVSSSYLAWYQQKPGQAPRLLIYGASSRATGIPDRFSGSGSGTDFTLTISRLEPEDFAVYYCQQYGSSPITFGQGTRLEIK

SEQ ID NO: 54 - protein, 12 aa, Artificial Sequence
  Description of Artificial Sequence: Synthetic peptide
  281VL4[CD28]_H1L1 vlCDR1
RASQSVSSSYLA

SEQ ID NO: 55 - protein, 7 aa, Artificial Sequence
  Description of Artificial Sequence: Synthetic peptide
  281VL4[CD28]_H1L1 vlCDR2
GASSRAT

SEQ ID NO: 56 - protein, 9 aa, Artificial Sequence
  Description of Artificial Sequence: Synthetic peptide
  281VL4[CD28]_H1L1 vlCDR3
QQYGSSPIT

SEQ ID NO: 57 - protein, 121 aa, Artificial Sequence
  Description of Artificial Sequence: Synthetic polypeptide
  HuTN228[CD28]_H1L1 Variable heavy (vh) domain
QVQLQESGPGLVKPSETLSLTCAVSGFSLTSYGVHWIRQPPGKGLEWLGVIWPGGGTNFNSALMSRLTISEDTSKNQVSLKLSSVTAADTAVYYCARDRAYGNYLYAMDYWGQGTLVTVSS

SEQ ID NO: 58 - protein, 5 aa, Artificial Sequence
  Description of Artificial Sequence: Synthetic peptide
  HuTN228[CD28]_H1L1 vhCDR1
SYGVH

SEQ ID NO: 59 - protein, 16 aa, Artificial Sequence
  Description of Artificial Sequence: Synthetic peptide
  HuTN228[CD28]_H1L1 vhCDR2
VIWPGGGTNFNSALMS

SEQ ID NO: 60 - protein, 13 aa, Artificial Sequence
  Description of Artificial Sequence: Synthetic peptide
  HuTN228[CD28]_H1L1 vhCDR3
DRAYGNYLYAMDY

SEQ ID NO: 61 - protein, 111 aa, Artificial Sequence
  Description of Artificial Sequence: Synthetic polypeptide
  HuTN228[CD28]_H1L1 Variable light (vl) domain
DIQMTQSPSSLSASVGDRVTITCRASESVEYYVTSLMQWYQQKPGKAPKLLIYAASNVDSGVPSRFSGSGSGTDFTLTISSLQPEDIATYYCQQSRKVPFTFGGGTKVEIK

SEQ ID NO: 62 - protein, 15 aa, Artificial Sequence
  Description of Artificial Sequence: Synthetic peptide
  HuTN228[CD28]_H1L1 vlCDR1
RASESVEYYVTSLMQ

SEQ ID NO: 63 - protein, 7 aa, Artificial Sequence
  Description of Artificial Sequence: Synthetic peptide
  HuTN228[CD28]_H1L1 vlCDR2
AASNVDS

SEQ ID NO: 64 - protein, 9 aa, Artificial Sequence
  Description of Artificial Sequence: Synthetic peptide
  HuTN228[CD28]_H1L1 vlCDR3
QQSRKVPFT

SEQ ID NO: 65 - protein, 124 aa, Artificial Sequence
  Description of Artificial Sequence: Synthetic polypeptide
  PV1[CD28]_H0L0 Variable heavy (vh) domain
QVQLKQSGAELVKPGASVKISCKTSGYTFTDGYMNWVEQKPGQGLEWIGRIDPDSGNTRYNQKFQGKATLTRDKSSSTVYMDLRSLTSEDSAVYYCARDGTFYGTYGYWYFDFWGQGTQVTVSS

SEQ ID NO: 66 - protein, 5 aa, Artificial Sequence
  Description of Artificial Sequence: Synthetic peptide
  PV1[CD28]_H0L0 vhCDR1
DGYMN

SEQ ID NO: 67 - protein, 17 aa, Artificial Sequence
  Description of Artificial Sequence: Synthetic peptide
  PV1[CD28]_H0L0 vhCDR2
RIDPDSGNTRYNQKFQG

SEQ ID NO: 68 - protein, 15 aa, Artificial Sequence
  Description of Artificial Sequence: Synthetic peptide
  PV1[CD28]_H0L0 vhCDR3
DGTFYGTYGYWYFDF

SEQ ID NO: 69 - protein, 113 aa, Artificial Sequence
  Description of Artificial Sequence: Synthetic polypeptide
  PV1[CD28]_H0L0 Variable light (vl) domain
DIVMTQSPYSLAVSAGEKVTMSCRSSQSLYYSGIKKNLLAWYQQKPGQSPKLLIYFTSTRLPGVPDRFTGSGSGTDYTLTITSVQAEDMGHYFCQQGISTPLTFGDGTKLEIR

SEQ ID NO: 70 - protein, 17 aa, Artificial Sequence
  Description of Artificial Sequence: Synthetic peptide
  PV1[CD28]_H0L0 vlCDR1
RSSQSLYYSGIKKNLLA

SEQ ID NO: 71 - protein, 7 aa, Artificial Sequence
  Description of Artificial Sequence: Synthetic peptide
  PV1[CD28]_H0L0 vlCDR2
FTSTRLP

SEQ ID NO: 72 - protein, 9 aa, Artificial Sequence
  Description of Artificial Sequence: Synthetic peptide
  PV1[CD28]_H0L0 vlCDR3
QQGISTPLT

SEQ ID NO: 73 - protein, 120 aa, Artificial Sequence
  Description of Artificial Sequence: Synthetic polypeptide
  m9.3[CD28]_H0L0 Variable heavy (vh) domain
EVKLQQSGPGLVTPSQSLSITCTVSGFSLSDYGVHWVRQSPGQGLEWLGVIWAGGGTNYNSALMSRKSISKDNSKSQVFLKMNSLQADDTAVYYCARDKGYSYYYSMDYWGQGTSVTVSS

SEQ ID NO: 74 - protein, 5 aa, Artificial Sequence
  Description of Artificial Sequence: Synthetic peptide
  m9.3[CD28]_H0L0 vhCDR1
DYGVH

SEQ ID NO: 75 - protein, 16 aa, Artificial Sequence
  Description of Artificial Sequence: Synthetic peptide
  m9.3[CD28]_H0L0 vhCDR2
VIWAGGGTNYNSALMS

SEQ ID NO: 76 - protein, 12 aa, Artificial Sequence
  Description of Artificial Sequence: Synthetic peptide
  m9.3[CD28]_H0L0 vhCDR3
DKGYSYYYSMDY

SEQ ID NO: 77 - protein, 111 aa, Artificial Sequence
  Description of Artificial Sequence: Synthetic polypeptide
  m9.3[CD28]_H0L0 Variable light (vl) domain
DIELTQSPASLAVSLGQRATISCRASESVEYYVTSLMQWYQQKPGQPPKLLIFAASNVESGVPARFSGSGSGTNFSLNIHPVDEDDVAMYFCQQSRKVPYTFGGGTKLEIK

SEQ ID NO: 78 - protein, 15 aa, Artificial Sequence
  Description of Artificial Sequence: Synthetic peptide
  m9.3[CD28]_H0L0 vlCDR1
RASESVEYYVTSLMQ

SEQ ID NO: 79 - protein, 7 aa, Artificial Sequence
  Description of Artificial Sequence: Synthetic peptide
  m9.3[CD28]_H0L0 vlCDR2
AASNVES

SEQ ID NO: 80 - protein, 9 aa, Artificial Sequence
  Description of Artificial Sequence: Synthetic peptide
  m9.3[CD28]_H0L0 vlCDR3
QQSRKVPYT

SEQ ID NO: 81 - protein, 120 aa, Artificial Sequence
  Description of Artificial Sequence: Synthetic polypeptide
  hu9.3[CD28]_H1L1 Variable heavy (vh) domain
EVQLVQSGGGLVQPGGSLRLSCAGSGFTFSDYGVHWVRQAPGKGLEWVSAIWAGGGTNYASSVMGRFTISRDNAKNSLYLQMNSLRAEDMAVYYCARDKGYSYYYSMDYWGQGTLVTVSS

SEQ ID NO: 82 - protein, 5 aa, Artificial Sequence
  Description of Artificial Sequence: Synthetic peptide
  hu9.3[CD28]_H1L1 vhCDR1
DYGVH

SEQ ID NO: 83 - protein, 16 aa, Artificial Sequence
  Description of Artificial Sequence: Synthetic peptide
  hu9.3[CD28]_H1L1 vhCDR2
AIWAGGGTNYASSVMG

SEQ ID NO: 84 - protein, 12 aa, Artificial Sequence
  Description of Artificial Sequence: Synthetic peptide
  hu9.3[CD28]_H1L1 vhCDR3
DKGYSYYYSMDY

SEQ ID NO: 85 - protein, 111 aa, Artificial Sequence
  Description of Artificial Sequence: Synthetic polypeptide
  hu9.3[CD28]_H1L1 Variable light (vl) domain
DIVMTQSPDSLAVSLGERATINCRASESVEYYVTSLMAWYQQKPGQPPKLLIYAASNVESGVPDRFSGSGSGTNFSLTISSLQAEDVAVYYCQQSRKVPYTFGQGTKLEIK

SEQ ID NO: 86 - protein, 15 aa, Artificial Sequence
  Description of Artificial Sequence: Synthetic peptide
  hu9.3[CD28]_H1L1 vlCDR1
RASESVEYYVTSLMA

SEQ ID NO: 87 - protein, 7 aa, Artificial Sequence
  Description of Artificial Sequence: Synthetic peptide
  hu9.3[CD28]_H1L1 vlCDR2
AASNVES

SEQ ID NO: 88 - protein, 9 aa, Artificial Sequence
  Description of Artificial Sequence: Synthetic peptide
  hu9.3[CD28]_H1L1 vlCDR3
QQSRKVPYT

SEQ ID NO: 89 - protein, 121 aa, Artificial Sequence
  Description of Artificial Sequence: Synthetic polypeptide
  2.14H9 OPT Variable heavy (vh) domain
EVQLVESGGGLVQPGGSLRLSCAASGFTFSRYWMSWVRQAPGKGLEWVANIKQDGSEKYYVDSVKGRFTISRDNAKNSLYLQMNSLRAEDTAVYYCAREGGWFGELAFDYWGQGTLVTVSS

SEQ ID NO: 90 - protein, 5 aa, Artificial Sequence
  Description of Artificial Sequence: Synthetic peptide
  2.14H9 OPT vhCDR1
RYWMS

SEQ ID NO: 91 - protein, 17 aa, Artificial Sequence
  Description of Artificial Sequence: Synthetic peptide
  2.14H9 OPT vhCDR2
NIKQDGSEKYYVDSVKG

SEQ ID NO: 92 - protein, 12 aa, Artificial Sequence
  Description of Artificial Sequence: Synthetic peptide
  2.14H9 OPT vhCDR3
EGGWFGELAFDY

SEQ ID NO: 93 - protein, 108 aa, Artificial Sequence
  Description of Artificial Sequence: Synthetic polypeptide
  2.14H9 OPT Variable light (vl) domain
EIVLTQSPGTLSLSPGERATLSCRASQRVSSSYLAWYQQKPGQAPRLLIYDASSRATGIPDRFSGSGSGTDFTLTISRLEPEDFAVYYCQQYGSLPWTFGQGTKVEIK

SEQ ID NO: 94 - protein, 12 aa, Artificial Sequence
  Description of Artificial Sequence: Synthetic peptide
  2.14H9 OPT vlCDR1
RASQRVSSSYLA

SEQ ID NO: 95 - protein, 7 aa, Artificial Sequence
  Description of Artificial Sequence: Synthetic peptide
  2.14H9 OPT vlCDR2
DASSRAT

SEQ ID NO: 96 - protein, 9 aa, Artificial Sequence
  Description of Artificial Sequence: Synthetic peptide
  2.14H9 OPT vlCDR3
QQYGSLPWT

SEQ ID NO: 97 - protein, 118 aa, Artificial Sequence
  Description of Artificial Sequence: Synthetic polypeptide
  atezolizumab Variable heavy (vh) domain
EVQLVESGGGLVQPGGSLRLSCAASGFTFSDSWIHWVRQAPGKGLEWVAWISPYGGSTYYADSVKGRFTISADTSKNTAYLQMNSLRAEDTAVYYCARRHWPGGFDYWGQGTLVTVSA

SEQ ID NO: 98 - protein, 5 aa, Artificial Sequence
  Description of Artificial Sequence: Synthetic peptide
  atezolizumab vhCDR1
DSWIH

SEQ ID NO: 99 - protein, 17 aa, Artificial Sequence
  Description of Artificial Sequence: Synthetic peptide
  atezolizumab vhCDR2
WISPYGGSTYYADSVKG

SEQ ID NO: 100 - protein, 9 aa, Artificial Sequence
  Description of Artificial Sequence: Synthetic peptide
  atezolizumab vhCDR3
RHWPGGFDY

SEQ ID NO: 101 - protein, 107 aa, Artificial Sequence [sequence omitted]

SEQ ID NO: 102 - protein, 11 aa, Artificial Sequence
  Description of Artificial Sequence: Synthetic peptide
  atezolizumab vlCDR1
RASQDVSTAVA

SEQ ID NO: 103 - protein, 7 aa, Artificial Sequence
  Description of Artificial Sequence: Synthetic peptide
  atezolizumab vlCDR2
SASFLYS

SEQ ID NO: 104 - protein, 9 aa, Artificial Sequence
  Description of Artificial Sequence: Synthetic peptide
  atezolizumab vlCDR3
QQYLYHPAT

SEQ ID NO: 105 - protein, 120 aa, Artificial Sequence
  Description of Artificial Sequence: Synthetic polypeptide
  avelumab Variable heavy (vh) domain
EVQLLESGGGLVQPGGSLRLSCAASGFTFSSYIMMWVRQAPGKGLEWVSSIYPSGGITFYADTVKGRFTISRDNSKNTLYLQMNSLRAEDTAVYYCARIKLGTVTTVDYWGQGTLVTVSS

SEQ ID NO: 106 - protein, 5 aa, Artificial Sequence
  Description of Artificial Sequence: Synthetic peptide
  avelumab vhCDR1
SYIMM

SEQ ID NO: 107 - protein, 17 aa, Artificial Sequence
  Description of Artificial Sequence: Synthetic peptide
  avelumab vhCDR2
SIYPSGGITFYADTVKG

SEQ ID NO: 108 - protein, 11 aa, Artificial Sequence
  Description of Artificial Sequence: Synthetic peptide
  avelumab vhCDR3
IKLGTVTTVDY

SEQ ID NO: 109 - protein, 110 aa, Artificial Sequence
  Description of Artificial Sequence: Synthetic polypeptide
  avelumab Variable light (vl) domain
QSALTQPASVSGSPGQSITISCTGTSSDVGGYNYVSWYQQHPGKAPKLMIYDVSNRPSGVSNRFSGSKSGNTASLTISGLQAEDEADYYCSSYTSSSTRVFGTGTKVTVL

SEQ ID NO: 110 - protein, 14 aa, Artificial Sequence
  Description of Artificial Sequence: Synthetic peptide
  avelumab vlCDR1
TGTSSDVGGYNYVS

SEQ ID NO: 111 - protein, 7 aa, Artificial Sequence
  Description of Artificial Sequence: Synthetic peptide
  avelumab vlCDR2
DVSNRPS

SEQ ID NO: 112 - protein, 10 aa, Artificial Sequence
  Description of Artificial Sequence: Synthetic peptide
  avelumab vlCDR3
SSYTSSSTRV

SEQ ID NO: 113 - protein, 123 aa, Artificial Sequence
  Description of Artificial Sequence: Synthetic polypeptide
  12A4 Variable heavy (vh) domain
QVQLVQSGAEVKKPGSSVKVSCKTSGDTFSTYAISWVRQAPGQGLEWMGGIIPIFGKAHYAQKFQGRVTITADESTSTAYMELSSLRSEDTAVYFCARKFHFVSGSPFGMDVWGQGTTVTVSS

SEQ ID NO: 114 - protein, 5 aa, Artificial Sequence
  Description of Artificial Sequence: Synthetic peptide
  12A4 vhCDR1
TYAIS

SEQ ID NO: 115 - protein, 17 aa, Artificial Sequence
  Description of Artificial Sequence: Synthetic peptide
  12A4 vhCDR2
GIIPIFGKAHYAQKFQG

SEQ ID NO: 116 - protein, 14 aa, Artificial Sequence
  Description of Artificial Sequence: Synthetic peptide
  12A4 vhCDR3
KFHFVSGSPFGMDV

SEQ ID NO: 117 - protein, 106 aa, Artificial Sequence
  Description of Artificial Sequence: Synthetic polypeptide
  12A4 Variable light (vl) domain
EIVLTQSPATLSLSPGERATLSCRASQSVSSYLAWYQQKPGQAPRLLIYDASNRATGIPARFSGSGSGTDFTLTISSLEPEDFAVYYCQQRSNWPTFGQGTKVEIK

SEQ ID NO: 118 - protein, 11 aa, Artificial Sequence
  Description of Artificial Sequence: Synthetic peptide
  12A4 vlCDR1
RASQSVSSYLA

SEQ ID NO: 119 - protein, 7 aa, Artificial Sequence
  Description of Artificial Sequence: Synthetic peptide
  12A4 vlCDR2
DASNRAT

SEQ ID NO: 120 - protein, 8 aa, Artificial Sequence
  Description of Artificial Sequence: Synthetic peptide
  12A4 vlCDR3
QQRSNWPT

SEQ ID NO: 121 - protein, 117 aa, Artificial Sequence
  Description of Artificial Sequence: Synthetic polypeptide
  3G10 Variable heavy (vh) domain
QVQLVQSGAEVKKPGASVKVSCKASGYTFTDYGFSWVRQAPGQGLEWMGWITAYNGNTNYAQKLQGRVTMTTDTSTSTVYMELRSLRSDDTAVYYCARDYFYGMDVWGQGTTVTVSS

SEQ ID NO: 122 - protein, 5 aa, Artificial Sequence
  Description of Artificial Sequence: Synthetic peptide
  3G10 vhCDR1
DYGFS

SEQ ID NO: 123 - protein, 17 aa, Artificial Sequence
  Description of Artificial Sequence: Synthetic peptide
  3G10 vhCDR2
WITAYNGNTNYAQKLQG

SEQ ID NO: 124 - protein, 8 aa, Artificial Sequence
  Description of Artificial Sequence: Synthetic peptide
  3G10 vhCDR3
DYFYGMDV

SEQ ID NO: 125 - protein, 107 aa, Artificial Sequence
  Description of Artificial Sequence: Synthetic polypeptide
  3G10 Variable light (vl) domain
EIVLTQSPATLSLSPGERATLSCRASQSVSSYLVWYQQKPGQAPRLLIYDASNRATGIPARFSGSGSGTDFTLTISSLEPEDFAVYYCQQRSNWPRTFGQGTKVEIK

SEQ ID NO: 126 - protein, 11 aa, Artificial Sequence
  Description of Artificial Sequence: Synthetic peptide
  3G10 vlCDR1
RASQSVSSYLV

SEQ ID NO: 127 - protein, 7 aa, Artificial Sequence
  Description of Artificial Sequence: Synthetic peptide
  3G10 vlCDR2
DASNRAT

SEQ ID NO: 128 - protein, 9 aa, Artificial Sequence
  Description of Artificial Sequence: Synthetic peptide
  3G10 vlCDR3
QQRSNWPRT

SEQ ID NO: 129 - protein, 118 aa, Artificial Sequence
  Description of Artificial Sequence: Synthetic polypeptide
  10A5 Variable heavy (vh) domain
QVQLVQSGAEVKKPGASVKVSCKASGYTFTSYDVHWVRQAPGQRLEWMGWLHADTGITKFSQKFQGRVTITRDTSASTAYMELSSLRSEDTAVYYCARERIQLWFDYWGQGTLVTVSS

SEQ ID NO: 130 - protein, 5 aa, Artificial Sequence
  Description of Artificial Sequence: Synthetic peptide
  10A5 vhCDR1
SYDVH

SEQ ID NO: 131 - protein, 17 aa, Artificial Sequence
  Description of Artificial Sequence: Synthetic peptide
  10A5 vhCDR2
WLHADTGITKFSQKFQG

SEQ ID NO: 132 - protein, 9 aa, Artificial Sequence
  Description of Artificial Sequence: Synthetic peptide
  10A5 vhCDR3
ERIQLWFDY

SEQ ID NO: 133 - protein, 107 aa, Artificial Sequence
  Description of Artificial Sequence: Synthetic polypeptide
  10A5 Variable light (vl) domain
DIQMTQSPSSLSASVGDRVTITCRASQGISSWLAWYQQKPEKAPKSLIYAASSLQSGVPSRFSGSGSGTDFTLTISSLQPEDFATYYCQQYNSYPYTFGQGTKLEIK

SEQ ID NO: 134 - protein, 11 aa, Artificial Sequence
  Description of Artificial Sequence: Synthetic peptide
  10A5 vlCDR1
RASQGISSWLA

SEQ ID NO: 135 - protein, 7 aa, Artificial Sequence
  Description of Artificial Sequence: Synthetic peptide
  10A5 vlCDR2
AASSLQS

SEQ ID NO: 136 - protein, 9 aa, Artificial Sequence
  Description of Artificial Sequence: Synthetic peptide
  10A5 vlCDR3
QQYNSYPYT

SEQ ID NO: 137 - protein, 114 aa, Artificial Sequence
  Description of Artificial Sequence: Synthetic polypeptide
  h3D10 Var1 Variable heavy (vh) domain
QVQLVQSGAEVKKPGASVKVSCKASGYTFPDYYMNWVRQAPGQGLEWMGDIDPNYGGTNYAQKFQGRVTMTRDTSISTAYMELSRLRSDDTAVYYCARGALTDWGQGTMVTVSS

SEQ ID NO: 138 - protein, 5 aa, Artificial Sequence
  Description of Artificial Sequence: Synthetic peptide
  h3D10 Var1 vhCDR1
DYYMN

SEQ ID NO: 139 - protein, 17 aa, Artificial Sequence
  Description of Artificial Sequence: Synthetic peptide
  h3D10 Var1 vhCDR2
DIDPNYGGTNYAQKFQG

SEQ ID NO: 140 - protein, 5 aa, Artificial Sequence
  Description of Artificial Sequence: Synthetic peptide
  h3D10 Var1 vhCDR3
GALTD

SEQ ID NO: 141 - protein, 106 aa, Artificial Sequence
  Description of Artificial Sequence: Synthetic polypeptide
  h3D10 Var1 Variable light (vl) domain
EIVLTQSPATLSLSPGERATLSCRASSSVSYIYWFQQKPGQAPRLLIYAAFNRATGIPARFSGSGSGTDYTLTISSLEPEDFAVYYCQQWSNNPLTFGQGTKVEIK

SEQ ID NO: 142 - protein, 10 aa, Artificial Sequence
  Description of Artificial Sequence: Synthetic peptide
  h3D10 Var1 vlCDR1
RASSSVSYIY

SEQ ID NO: 143 - protein, 7 aa, Artificial Sequence
  Description of Artificial Sequence: Synthetic peptide
  h3D10 Var1 vlCDR2
AAFNRAT

SEQ ID NO: 144 - protein, 9 aa, Artificial Sequence
  Description of Artificial Sequence: Synthetic peptide
  h3D10 Var1 vlCDR3
QQWSNNPLT

SEQ ID NO: 145 - protein, 114 aa, Artificial Sequence
  Description of Artificial Sequence: Synthetic polypeptide
  h3D10 Var2 Variable heavy (vh) domain
QVQLVQSGAEVKKPGASVKVSCKASGYTFPDYYMNWVRQAPGQSLEWMGDIDPNYGGTNYNQKFQGRVTMTRDTSISTAYMELSRLRSDDTAVYYCARGALTDWGQGTMVTVSS

SEQ ID NO: 146 - protein, 5 aa, Artificial Sequence
  Description of Artificial Sequence: Synthetic peptide
  h3D10 Var2 vhCDR1
DYYMN

SEQ ID NO: 147 - protein, 17 aa, Artificial Sequence
  Description of Artificial Sequence: Synthetic peptide
  h3D10 Var2 vhCDR2
DIDPNYGGTNYNQKFQG

SEQ ID NO: 148 - protein, 5 aa, Artificial Sequence
  Description of Artificial Sequence: Synthetic peptide
  h3D10 Var2 vhCDR3
GALTD

SEQ ID NO: 149 - protein, 106 aa, Artificial Sequence
  Description of Artificial Sequence: Synthetic polypeptide
  h3D10 Var2 Variable light (vl) domain
EIVLTQSPATLSLSPGERATLSCRASSSVSYIYWFQQKPGQSPRPLIYAAFNRATGIPARFSGSGSGTDYTLTISSLEPEDFAVYYCQQWSNNPLTFGQGTKVEIK

SEQ ID NO: 150 - protein, 10 aa, Artificial Sequence
  Description of Artificial Sequence: Synthetic peptide
  h3D10 Var2 vlCDR1
RASSSVSYIY

SEQ ID NO: 151 - protein, 7 aa, Artificial Sequence
  Description of Artificial Sequence: Synthetic peptide
  h3D10 Var2 vlCDR2
AAFNRAT

SEQ ID NO: 152 - protein, 9 aa, Artificial Sequence
  Description of Artificial Sequence: Synthetic peptide
  h3D10 Var2 vlCDR3
QQWSNNPLT

SEQ ID NO: 153 - protein, 114 aa, Artificial Sequence; identical to SEQ ID NO: 145
  Description of Artificial Sequence: Synthetic polypeptide
  h3D10 Var3 Variable heavy (vh) domain

SEQ ID NO: 154 - protein, 5 aa, Artificial Sequence
  Description of Artificial Sequence: Synthetic peptide
  h3D10 Var3 vhCDR1
DYYMN

SEQ ID NO: 155 - protein, 17 aa, Artificial Sequence
  Description of Artificial Sequence: Synthetic peptide
  h3D10 Var3 vhCDR2
DIDPNYGGTNYNQKFQG

SEQ ID NO: 156 - protein, 5 aa, Artificial Sequence
  Description of Artificial Sequence: Synthetic peptide
  h3D10 Var3 vhCDR3
GALTD

SEQ ID NO: 157 - protein, 106 aa, Artificial Sequence
  Description of Artificial Sequence: Synthetic polypeptide
  h3D10 Var3 Variable light (vl) domain
QIVLTQSPATLSLSPGERATLSCRASSSVSYIYWFQQKPGQSPRPLIYATFNLASGIPARFSGSGSGTSYTLTISRLEPEDFAVYYCQQWSNNPLTFGQGTKVEIK

SEQ ID NO: 158 - protein, 10 aa, Artificial Sequence
  Description of Artificial Sequence: Synthetic peptide
  h3D10 Var3 vlCDR1
RASSSVSYIY

SEQ ID NO: 159 - protein, 7 aa, Artificial Sequence
  Description of Artificial Sequence: Synthetic peptide
  h3D10 Var3 vlCDR2
ATFNLAS

SEQ ID NO: 160 - protein, 9 aa, Artificial Sequence
  Description of Artificial Sequence: Synthetic peptide
  h3D10 Var3 vlCDR3
QQWSNNPLT

SEQ ID NO: 161 - protein, 114 aa, Artificial Sequence
  Description of Artificial Sequence: Synthetic polypeptide
  h3D10 Var4 Variable heavy (vh) domain
EVQLVQSGAEVKKPGASVKVSCKASGYTFPDYYMNWVRQAPGQSLEWMGDIDPNYGGTNYNQKFQGRVTMTVDRSSSTAYMELSRLRSDDTAVYYCARGALTDWGQGTMVTVSS

SEQ ID NO: 162 - protein, 5 aa, Artificial Sequence
  Description of Artificial Sequence: Synthetic peptide
  h3D10 Var4 vhCDR1
DYYMN

SEQ ID NO: 163 - protein, 17 aa, Artificial Sequence
  Description of Artificial Sequence: Synthetic peptide
  h3D10 Var4 vhCDR2
DIDPNYGGTNYNQKFQG

SEQ ID NO: 164 - protein, 5 aa, Artificial Sequence
  Description of Artificial Sequence: Synthetic peptide
  h3D10 Var4 vhCDR3
GALTD

SEQ ID NO: 165 - protein, 106 aa, Artificial Sequence; identical to SEQ ID NO: 149
  Description of Artificial Sequence: Synthetic polypeptide
  h3D10 Var4 Variable light (vl) domain

SEQ ID NO: 166 - protein, 10 aa, Artificial Sequence
  Description of Artificial Sequence: Synthetic peptide
  h3D10 Var4 vlCDR1
RASSSVSYIY

SEQ ID NO: 167 - protein, 7 aa, Artificial Sequence
  Description of Artificial Sequence: Synthetic peptide
  h3D10 Var4 vlCDR2
AAFNRAT

SEQ ID NO: 168 - protein, 9 aa, Artificial Sequence
  Description of Artificial Sequence: Synthetic peptide
  h3D10 Var4 vlCDR3
QQWSNNPLT

SEQ ID NO: 169 - protein, 114 aa, Artificial Sequence
  Description of Artificial Sequence: Synthetic polypeptide
  h3D10 Var5 Variable heavy (vh) domain
EVQLVESGGGLVQPGRSLRLSCTASGYTFPDYYMNWVRQAPGKGLEWVGDIDPNYGGTTYNQSVKGRFTISVDRSKSIAYLQMSSLKTEDTAVYYCARGALTDWGQGTMVTVSS

SEQ ID NO: 170 - protein, 5 aa, Artificial Sequence
  Description of Artificial Sequence: Synthetic peptide
  h3D10 Var5 vhCDR1
DYYMN

SEQ ID NO: 171 - protein, 17 aa, Artificial Sequence
  Description of Artificial Sequence: Synthetic peptide
  h3D10 Var5 vhCDR2
DIDPNYGGTTYNQSVKG

SEQ ID NO: 172 - protein, 5 aa, Artificial Sequence
  Description of Artificial Sequence: Synthetic peptide
  h3D10 Var5 vhCDR3
GALTD

SEQ ID NO: 173 - protein, 106 aa, Artificial Sequence
  Description of Artificial Sequence: Synthetic polypeptide
  h3D10 Var5 Variable light (vl) domain
DIQLTQSPSILSASVGDRVTITCRASSSVSYIYWFQQKPGKAPKPLIYATFNLASGVPSRFSGSGSGTSYTLTISSLQPEDFATYYCQQWSNNPLTFGQGTKVEIK

SEQ ID NO: 174 - protein, 10 aa, Artificial Sequence
  Description of Artificial Sequence: Synthetic peptide
  h3D10 Var5 vlCDR1
RASSSVSYIY

SEQ ID NO: 175 - protein, 7 aa, Artificial Sequence
  Description of Artificial Sequence: Synthetic peptide
  h3D10 Var5 vlCDR2
ATFNLAS

SEQ ID NO: 176 - protein, 9 aa, Artificial Sequence
  Description of Artificial Sequence: Synthetic peptide
  h3D10 Var5 vlCDR3
QQWSNNPLT

SEQ ID NO: 177 - protein, 114 aa, Artificial Sequence
  Description of Artificial Sequence: Synthetic polypeptide
  h3D10 Var6 Variable heavy (vh) domain
EVQLVESGGGLVQPGRSLRLSCTASGYTFPDYYMNWVRQAPGKGLEWVGDIDPNYGGTTYAASVKGRFTISVDRSKSIAYLQMSSLKTEDTAVYYCTRGALTDWGQGTMVTVSS

SEQ ID NO: 178 - protein, 5 aa, Artificial Sequence
  Description of Artificial Sequence: Synthetic peptide
  h3D10 Var6 vhCDR1
DYYMN

SEQ ID NO: 179 - protein, 17 aa, Artificial Sequence
  Description of Artificial Sequence: Synthetic peptide
  h3D10 Var6 vhCDR2
DIDPNYGGTTYAASVKG

SEQ ID NO: 180 - protein, 5 aa, Artificial Sequence
  Description of Artificial Sequence: Synthetic peptide
  h3D10 Var6 vhCDR3
GALTD

SEQ ID NO: 181 - protein, 106 aa, Artificial Sequence; identical to SEQ ID NO: 141
  Description of Artificial Sequence: Synthetic polypeptide
  h3D10 Var6 Variable light (vl) domain

SEQ ID NO: 182 - protein, 10 aa, Artificial Sequence
  Description of Artificial Sequence: Synthetic peptide
  h3D10 Var6 vlCDR1
RASSSVSYIY

SEQ ID NO: 183 - protein, 7 aa, Artificial Sequence
  Description of Artificial Sequence: Synthetic peptide
  h3D10 Var6 vlCDR2
AAFNRAT

SEQ ID NO: 184 - protein, 9 aa, Artificial Sequence
  Description of Artificial Sequence: Synthetic peptide
  h3D10 Var6 vlCDR3
QQWSNNPLT

SEQ ID NO: 185 - protein, 114 aa, Artificial Sequence; identical to SEQ ID NO: 137
  Description of Artificial Sequence: Synthetic polypeptide
  h3D10 Var7 Variable heavy (vh) domain

SEQ ID NO: 186 - protein, 5 aa, Artificial Sequence
  Description of Artificial Sequence: Synthetic peptide
  h3D10 Var7 vhCDR1
DYYMN

SEQ ID NO: 187 - protein, 17 aa, Artificial Sequence
  Description of Artificial Sequence: Synthetic peptide
  h3D10 Var7 vhCDR2
DIDPNYGGTNYAQKFQG

SEQ ID NO: 188 - protein, 5 aa, Artificial Sequence
  Description of Artificial Sequence: Synthetic peptide
  h3D10 Var7 vhCDR3
GALTD

SEQ ID NO: 189 - protein, 106 aa, Artificial Sequence
  Description of Artificial Sequence: Synthetic polypeptide
  h3D10 Var7 Variable light (vl) domain
DIQLTQSPSSLSASVGDRVTITCRASSGVSYIYWFQQKPGKAPKLLIYAAFNLASGVPSRFSGSGSGTEYTLTISSLQPEDFATYYCQQWSNNPLTFGQGTKVEIK

SEQ ID NO: 190 - protein, 10 aa, Artificial Sequence
  Description of Artificial Sequence: Synthetic peptide
  h3D10 Var7 vlCDR1
RASSGVSYIY

SEQ ID NO: 191 - protein, 7 aa, Artificial Sequence
  Description of Artificial Sequence: Synthetic peptide
  h3D10 Var7 vlCDR2
AAFNLAS

SEQ ID NO: 192 - protein, 9 aa, Artificial Sequence
  Description of Artificial Sequence: Synthetic peptide
  h3D10 Var7 vlCDR3
QQWSNNPLT

SEQ ID NO: 193 - protein, 114 aa, Artificial Sequence; identical to SEQ ID NO: 169
  Description of Artificial Sequence: Synthetic polypeptide
  h3D10 Var8 Variable heavy (vh) domain

SEQ ID NO: 194 - protein, 5 aa, Artificial Sequence
  Description of Artificial Sequence: Synthetic peptide
  h3D10 Var8 vhCDR1
DYYMN

SEQ ID NO: 195 - protein, 17 aa, Artificial Sequence
  Description of Artificial Sequence: Synthetic peptide
  h3D10 Var8 vhCDR2
DIDPNYGGTTYNQSVKG

SEQ ID NO: 196 - protein, 5 aa, Artificial Sequence
  Description of Artificial Sequence: Synthetic peptide
  h3D10 Var8 vhCDR3
GALTD

SEQ ID NO: 197 - protein, 106 aa, Artificial Sequence; identical to SEQ ID NO: 157
  Description of Artificial Sequence: Synthetic polypeptide
  h3D10 Var8 Variable light (vl) domain

SEQ ID NO: 198 - protein, 10 aa, Artificial Sequence
  Description of Artificial Sequence: Synthetic peptide
  h3D10 Var8 vlCDR1
RASSSVSYIY

SEQ ID NO: 199 - protein, 7 aa, Artificial Sequence
  Description of Artificial Sequence: Synthetic peptide
  h3D10 Var8 vlCDR2
ATFNLAS

SEQ ID NO: 200 - protein, 9 aa, Artificial Sequence
  Description of Artificial Sequence: Synthetic peptide
  h3D10 Var8 vlCDR3
QQWSNNPLT

SEQ ID NO: 201 - protein, 114 aa, Artificial Sequence; identical to SEQ ID NO: 169
  Description of Artificial Sequence: Synthetic polypeptide
  h3D10 Var9 Variable heavy (vh) domain

SEQ ID NO: 202 - protein, 5 aa, Artificial Sequence
  Description of Artificial Sequence: Synthetic peptide
  h3D10 Var9 vhCDR1
DYYMN

SEQ ID NO: 203 - protein, 17 aa, Artificial Sequence
  Description of Artificial Sequence: Synthetic peptide
  h3D10 Var9 vhCDR2
DIDPNYGGTTYNQSVKG

SEQ ID NO: 204 - protein, 5 aa, Artificial Sequence
  Description of Artificial Sequence: Synthetic peptide
  h3D10 Var9 vhCDR3
GALTD

SEQ ID NO: 205 - protein, 106 aa, Artificial Sequence
  Description of Artificial Sequence: Synthetic polypeptide
  h3D10 Var9 Variable light (vl) domain
DIQLTQSPSSLSASVGDRVTITCRASSGVSYIYWFQQKPGKAPKPLIYAAFNLASGVPSRFSGSGSGTEYTLTISSLQPEDFATYYCQQWSNNPLTFGQGTKVEIK

SEQ ID NO: 206 - protein, 10 aa, Artificial Sequence
  Description of Artificial Sequence: Synthetic peptide
  h3D10 Var9 vlCDR1
RASSGVSYIY

SEQ ID NO: 207 - protein, 7 aa, Artificial Sequence
  Description of Artificial Sequence: Synthetic peptide
  h3D10 Var9 vlCDR2
AAFNLAS

SEQ ID NO: 208 - protein, 9 aa, Artificial Sequence
  Description of Artificial Sequence: Synthetic peptide
  h3D10 Var9 vlCDR3
QQWSNNPLT

SEQ ID NO: 209 - protein, 114 aa, Artificial Sequence; identical to SEQ ID NO: 169
  Description of Artificial Sequence: Synthetic polypeptide
  h3D10 Var10 Variable heavy (vh) domain

SEQ ID NO: 210 - protein, 5 aa, Artificial Sequence
  Description of Artificial Sequence: Synthetic peptide
  h3D10 Var10 vhCDR1
DYYMN

SEQ ID NO: 211 - protein, 17 aa, Artificial Sequence
  Description of Artificial Sequence: Synthetic peptide
  h3D10 Var10 vhCDR2
DIDPNYGGTTYNQSVKG

SEQ ID NO: 212 - protein, 5 aa, Artificial Sequence
  Description of Artificial Sequence: Synthetic peptide
  h3D10 Var10 vhCDR3
GALTD

SEQ ID NO: 213 - protein, 106 aa, Artificial Sequence; identical to SEQ ID NO: 173
  Description of Artificial Sequence: Synthetic polypeptide
  h3D10 Var10 Variable light (vl) domain

SEQ ID NO: 214 - protein, 10 aa, Artificial Sequence
  Description of Artificial Sequence: Synthetic peptide
  h3D10 Var10 vlCDR1
RASSSVSYIY

SEQ ID NO: 215 - protein, 7 aa, Artificial Sequence
  Description of Artificial Sequence: Synthetic peptide
  h3D10 Var10 vlCDR2
ATFNLAS

SEQ ID NO: 216 - protein, 9 aa, Artificial Sequence
  Description of Artificial Sequence: Synthetic peptide
  h3D10 Var10 vlCDR3
QQWSNNPLT

SEQ ID NO: 217 - protein, 114 aa, Artificial Sequence; identical to SEQ ID NO: 177
  Description of Artificial Sequence: Synthetic polypeptide
  h3D10 Var11 Variable heavy (vh) domain

SEQ ID NO: 218 - protein, 5 aa, Artificial Sequence
  Description of Artificial Sequence: Synthetic peptide
  h3D10 Var11 vhCDR1
DYYMN

SEQ ID NO: 219 - protein, 17 aa, Artificial Sequence
  Description of Artificial Sequence: Synthetic peptide
  h3D10 Var11 vhCDR2
DIDPNYGGTTYAASVKG

SEQ ID NO: 220 - protein, 5 aa, Artificial Sequence
  Description of Artificial Sequence: Synthetic peptide
  h3D10 Var11 vhCDR3
GALTD

SEQ ID NO: 221 - protein, 106 aa, Artificial Sequence; identical to SEQ ID NO: 141
  Description of Artificial Sequence: Synthetic polypeptide
  h3D10 Var11 Variable light (vl) domain

SEQ ID NO: 222 - protein, 10 aa, Artificial Sequence
  Description of Artificial Sequence: Synthetic peptide
  h3D10 Var11 vlCDR1
RASSSVSYIY

SEQ ID NO: 223 - protein, 7 aa, Artificial Sequence
  Description of Artificial Sequence: Synthetic peptide
  h3D10 Var11 vlCDR2
AAFNRAT

SEQ ID NO: 224 - protein, 9 aa, Artificial Sequence
  Description of Artificial Sequence: Synthetic peptide
  h3D10 Var11 vlCDR3
QQWSNNPLT

SEQ ID NO: 225 - protein, 114 aa, Artificial Sequence; identical to SEQ ID NO: 137
  Description of Artificial Sequence: Synthetic polypeptide
  h3D10 Var12 Variable heavy (vh) domain

SEQ ID NO: 226 - protein, 5 aa, Artificial Sequence
  Description of Artificial Sequence: Synthetic peptide
  h3D10 Var12 vhCDR1
DYYMN

SEQ ID NO: 227 - protein, 17 aa, Artificial Sequence
  Description of Artificial Sequence: Synthetic peptide
  h3D10 Var12 vhCDR2
DIDPNYGGTNYAQKFQG

SEQ ID NO: 228 - protein, 5 aa, Artificial Sequence
  Description of Artificial Sequence: Synthetic peptide
  h3D10 Var12 vhCDR3
GALTD

SEQ ID NO: 229 - protein, 106 aa, Artificial Sequence; identical to SEQ ID NO: 189
  Description of Artificial Sequence: Synthetic polypeptide
  h3D10 Var12 Variable light (vl) domain

SEQ ID NO: 230 - protein, 10 aa, Artificial Sequence
  Description of Artificial Sequence: Synthetic peptide
  h3D10 Var12 vlCDR1
RASSGVSYIY

SEQ ID NO: 231 - protein, 7 aa, Artificial Sequence
  Description of Artificial Sequence: Synthetic peptide
  h3D10 Var12 vlCDR2
AAFNLAS

SEQ ID NO: 232 - protein, 9 aa, Artificial Sequence
  Description of Artificial Sequence: Synthetic peptide
  h3D10 Var12 vlCDR3
QQWSNNPLT

SEQ ID NO: 233 - protein, 114 aa, Artificial Sequence; identical to SEQ ID NO: 169
  Description of Artificial Sequence: Synthetic polypeptide
  h3D10 Var13 Variable heavy (vh) domain

SEQ ID NO: 234 - protein, 5 aa, Artificial Sequence
  Description of Artificial Sequence: Synthetic peptide
  h3D10 Var13 vhCDR1
DYYMN

SEQ ID NO: 235 - protein, 17 aa, Artificial Sequence
  Description of Artificial Sequence: Synthetic peptide
  h3D10 Var13 vhCDR2
DIDPNYGGTTYNQSVKG

SEQ ID NO: 236 - protein, 5 aa, Artificial Sequence
  Description of Artificial Sequence: Synthetic peptide
  h3D10 Var13 vhCDR3
GALTD

SEQ ID NO: 237 - protein, 106 aa, Artificial Sequence; identical to SEQ ID NO: 157
  Description of Artificial Sequence: Synthetic polypeptide
  h3D10 Var13 Variable light (vl) domain

SEQ ID NO: 238 - protein, 10 aa, Artificial Sequence
  Description of Artificial Sequence: Synthetic peptide
  h3D10 Var13 vlCDR1
RASSSVSYIY

SEQ ID NO: 239 - protein, 7 aa, Artificial Sequence
  Description of Artificial Sequence: Synthetic peptide
  h3D10 Var13 vlCDR2
ATFNLAS

SEQ ID NO: 240 - protein, 9 aa, Artificial Sequence
  Description of Artificial Sequence: Synthetic peptide
  h3D10 Var13 vlCDR3
QQWSNNPLT

SEQ ID NO: 241 - protein, 114 aa, Artificial Sequence; identical to SEQ ID NO: 161
  Description of Artificial Sequence: Synthetic polypeptide
  h3D10 Var14 Variable heavy (vh) domain

SEQ ID NO: 242 - protein, 5 aa, Artificial Sequence
  Description of Artificial Sequence: Synthetic peptide
  h3D10 Var14 vhCDR1
DYYMN

SEQ ID NO: 243 - protein, 17 aa, Artificial Sequence
  Description of Artificial Sequence: Synthetic peptide
  h3D10 Var14 vhCDR2
DIDPNYGGTNYNQKFQG

SEQ ID NO: 244 - protein, 5 aa, Artificial Sequence
  Description of Artificial Sequence: Synthetic peptide
  h3D10 Var14 vhCDR3
GALTD

SEQ ID NO: 245 - protein, 106 aa, Artificial Sequence; identical to SEQ ID NO: 173
  Description of Artificial Sequence: Synthetic polypeptide
  h3D10 Var14 Variable light (vl) domain

SEQ ID NO: 246 - protein, 10 aa, Artificial Sequence
  Description of Artificial Sequence: Synthetic peptide
  h3D10 Var14 vlCDR1
RASSSVSYIY

SEQ ID NO: 247 - protein, 7 aa, Artificial Sequence
  Description of Artificial Sequence: Synthetic peptide
  h3D10 Var14 vlCDR2
ATFNLAS

SEQ ID NO: 248 - protein, 9 aa, Artificial Sequence
  Description of Artificial Sequence: Synthetic peptide
  h3D10 Var14 vlCDR3
QQWSNNPLT

SEQ ID NO: 249 - protein, 123 aa, Artificial Sequence
  Description of Artificial Sequence: Synthetic polypeptide
  Antibody A Variable heavy (vh) domain
QVQLVQSGAEVKKPGSSVKVSCKASGGTFSSYAISWVRQAPGQGLEWMGGIIPIFGTANYAQKFQGRVTITADKSTSTAYMELSSLRSEDTAVYYCARSPDYSPYYYYGMDVWGQGTTVTVSS

SEQ ID NO: 250 - protein, 5 aa, Artificial Sequence
  Description of Artificial Sequence: Synthetic peptide
  Antibody A vhCDR1
SYAIS

SEQ ID NO: 251 - protein, 17 aa, Artificial Sequence
  Description of Artificial Sequence: Synthetic peptide
  Antibody A vhCDR2
GIIPIFGTANYAQKFQG

SEQ ID NO: 252 - protein, 14 aa, Artificial Sequence
  Description of Artificial Sequence: Synthetic peptide
  Antibody A vhCDR3
SPDYSPYYYYGMDV

SEQ ID NO: 253 - protein, 110 aa, Artificial Sequence
  Description of Artificial Sequence: Synthetic polypeptide
  Antibody A Variable light (vl) domain
QSVLTQPPSASGTPGQRVTISCSGSSSNIGSNTVNWYQQLPGTAPKLLIYGNSNRPSGVPDRFSGSKSGTSASLAISGLQSEDEADYYCQSYDSSLSGSVFGGGIKLTVL

SEQ ID NO: 254 - protein, 13 aa, Artificial Sequence
  Description of Artificial Sequence: Synthetic peptide
  Antibody A vlCDR1
SGSSSNIGSNTVN

SEQ ID NO: 255 - protein, 7 aa, Artificial Sequence
  Description of Artificial Sequence: Synthetic peptide
  Antibody A vlCDR2
GNSNRPS

SEQ ID NO: 256 - protein, 11 aa, Artificial Sequence
  Description of Artificial Sequence: Synthetic peptide
  Antibody A vlCDR3
QSYDSSLSGSV

SEQ ID NO: 257 - protein, 116 aa, Artificial Sequence
  Description of Artificial Sequence: Synthetic polypeptide
  C5H9v2 Variable heavy (vh) domain
EVQLLESGGGLVQPGGSLRLSCAASGFTFSSYAMSWVRQAPGKGLEWVSSIWRNGIVTVYADSVKGRFTISRDNSKNTLYLQMNSLRAEDTAVYYCAKWSAAFDYWGQGTLVTVSS

SEQ ID NO: 258 - protein, 5 aa, Artificial Sequence
  Description of Artificial Sequence: Synthetic peptide
  C5H9v2 vhCDR1
SYAMS

SEQ ID NO: 259 - protein, 17 aa, Artificial Sequence
  Description of Artificial Sequence: Synthetic peptide
  C5H9v2 vhCDR2
SIWRNGIVTVYADSVKG

SEQ ID NO: 260 - protein, 7 aa, Artificial Sequence
  Description of Artificial Sequence: Synthetic peptide
  C5H9v2 vhCDR3
WSAAFDY

SEQ ID NO: 261 - protein, 107 aa, Artificial Sequence
  Description of Artificial Sequence: Synthetic polypeptide
  C5H9v2 Variable light (vl) domain
DIQMTQSPSSLSASVGDRVTITCRASQSISSYLNWYQQKPGKAPKLLIYAASSLQSGVPSRFSGSGSGTDFTLTISSLQPEDFATYYCQQDNGYPSTFGGGTKVEIK

SEQ ID NO: 262 - protein, 11 aa, Artificial Sequence
  Description of Artificial Sequence: Synthetic peptide
  C5H9v2 vlCDR1
RASQSISSYLN

SEQ ID NO: 263 - protein, 7 aa, Artificial Sequence
  Description of Artificial Sequence: Synthetic peptide
  C5H9v2 vlCDR2
AASSLQS

SEQ ID NO: 264 - protein, 9 aa, Artificial Sequence
  Description of Artificial Sequence: Synthetic peptide
  C5H9v2 vlCDR3
QQDNGYPST

SEQ ID NO: 265 - protein, 94 aa, Artificial Sequence
  Description of Artificial Sequence: Synthetic polypeptide
  Humanized 29E.2A3 Variable heavy (vh) domain
CKASGYTFTSYVMHWVKQAPGQRLEWIGYVNPFNDGTKYNEMFKGRATLTSDKSTSTAYMELSSLRSEDTAVYYCARQAWGYPWGQGTLVTVSS

SEQ ID NO: 266 - protein, 5 aa, Artificial Sequence
  Description of Artificial Sequence: Synthetic peptide
  Humanized 29E.2A3 vhCDR1
SYVMH

SEQ ID NO: 267 - protein, 17 aa, Artificial Sequence
  Description of Artificial Sequence: Synthetic peptide
  Humanized 29E.2A3 vhCDR2
YVNPFNDGTKYNEMFKG

SEQ ID NO: 268 - protein, 6 aa, Artificial Sequence
  Description of Artificial Sequence: Synthetic peptide
  Humanized 29E.2A3 vhCDR3
QAWGYP

SEQ ID NO: 269 - protein, 111 aa, Artificial Sequence
  Description of Artificial Sequence: Synthetic polypeptide
  Humanized 29E.2A3 Variable light (vl) domain
DIVLTQSPATLSLSPGERATLSCRATESVEYYGTSLVQWYQQKPGQPPKLLIYAASSVDSGVPSRFSGSGSGTDFTLTINSLEAEDAATYFCQQSRRVPYTFGQGTKLEIK

SEQ ID NO: 270 - protein, 15 aa, Artificial Sequence
  Description of Artificial Sequence: Synthetic peptide
  Humanized 29E.2A3 vlCDR1
RATESVEYYGTSLVQ

SEQ ID NO: 271 - protein, 7 aa, Artificial Sequence
  Description of Artificial Sequence: Synthetic peptide
  Humanized 29E.2A3 vlCDR2
AASSVDS

SEQ ID NO: 272 - protein, 9 aa, Artificial Sequence
  Description of Artificial Sequence: Synthetic peptide
  Humanized 29E.2A3 vlCDR3
QQSRRVPYT

SEQ ID NO: 273 - protein, 121 aa, Artificial Sequence
  Description of Artificial Sequence: Synthetic polypeptide
  1B9 Variable heavy (vh) domain
DVQLQESGPGLVKPSQSLSLTCTVTGYSITSDHAWNWIRQVPGNKLEWMGYITYRGSTTYSPSLKSRISITRDTSKNQFFLQLNSVTTEDTATYYCARSMITTGYYVMDYWGQGTSVTVSS

SEQ ID NO: 274 - protein, 6 aa, Artificial Sequence
  Description of Artificial Sequence: Synthetic peptide
  1B9 vhCDR1
SDHAWN

SEQ ID NO: 275 - protein, 16 aa, Artificial Sequence
  Description of Artificial Sequence: Synthetic peptide
  1B9 vhCDR2
YITYRGSTTYSPSLKS

SEQ ID NO: 276 - protein, 12 aa, Artificial Sequence
  Description of Artificial Sequence: Synthetic peptide
  1B9 vhCDR3
SMITTGYYVMDY

SEQ ID NO: 277 - protein, 107 aa, Artificial Sequence
  Description of Artificial Sequence: Synthetic polypeptide
  1B9 Variable light (vl) domain
DIVMTQSHKFMSTSLGDRVTITCKASQDVGISVVWYQQKPGQSPKLLIYWASTRHTGVPDRFTGSGSGTDFTLTINNVQSEDLADYFCQQYSSYPLTVGAGTKLELK

SEQ ID NO: 278 - protein, 11 aa, Artificial Sequence
  Description of Artificial Sequence: Synthetic peptide
  1B9 vlCDR1
KASQDVGISVV

SEQ ID NO: 279 - protein, 7 aa, Artificial Sequence
  Description of Artificial Sequence: Synthetic peptide
  1B9 vlCDR2
WASTRHT

SEQ ID NO: 280 - protein, 9 aa, Artificial Sequence
  Description of Artificial Sequence: Synthetic peptide
  1B9 vlCDR3
QQYSSYPLT

SEQ ID NO: 281 - protein, 121 aa, Artificial Sequence
  Description of Artificial Sequence: Synthetic polypeptide
  4H1 Variable heavy (vh) domain
DVQLQESGPGLVKPSQSLSLTCTVTDYSITSDYAWTWIRQFPGNKLEWMGYITYRGTTRYNPSLTSRISFTRDTSKNQLFLQLNSVTTEDTGTYCCARSMITTGYYAMDYWGQGTSVTVSS

SEQ ID NO: 282 - protein, 6 aa, Artificial Sequence
  Description of Artificial Sequence: Synthetic peptide
  4H1 vhCDR1
SDYAWT

SEQ ID NO: 283 - protein, 16 aa, Artificial Sequence
  Description of Artificial Sequence: Synthetic peptide
  4H1 vhCDR2
YITYRGTTRYNPSLTS

SEQ ID NO: 284 - protein, 12 aa, Artificial Sequence
  Description of Artificial Sequence: Synthetic peptide
  4H1 vhCDR3
SMITTGYYAMDY

SEQ ID NO: 285 - protein, 107 aa, Artificial Sequence
  Description of Artificial Sequence: Synthetic polypeptide
  4H1 Variable light (vl) domain
DIVMTQSHKFMSTSVGDRVSISCKASQDVGISVAWYQQKPGQSPKLLIYWASTRHTGVPVRFTGSGSGTDFTLTISNVQSEDLADYFCQQYSSYPPTFGAGTKLELK

SEQ ID NO: 286 - protein, 11 aa, Artificial Sequence
  Description of Artificial Sequence: Synthetic peptide
  4H1 vlCDR1
KASQDVGISVA

SEQ ID NO: 287 - protein, 7 aa, Artificial Sequence
  Description of Artificial Sequence: Synthetic peptide
  4H1 vlCDR2
WASTRHT

SEQ ID NO: 288 - protein, 9 aa, Artificial Sequence
  Description of Artificial Sequence: Synthetic peptide
  4H1 vlCDR3
QQYSSYPPT

SEQ ID NO: 289 - protein, 120 aa, Artificial Sequence
  Description of Artificial Sequence: Synthetic polypeptide
  mAb-42 Variable heavy (vh) domain
QVQLVQSGAEVKKPGSSVKVSCKASGGTFSSYAISWVRQAPGQGLEWMGGIIPIFGTANYAQKFQGRVTITADKSTSTAYMELSSLRSEDTAVYYCARGRQMFGAGIDFWGPGTLVTVSS

SEQ ID NO: 290 - protein, 5 aa, Artificial Sequence
  Description of Artificial Sequence: Synthetic peptide
  mAb-42 vhCDR1
SYAIS

SEQ ID NO: 291 - protein, 17 aa, Artificial Sequence
  Description of Artificial Sequence: Synthetic peptide
  mAb-42 vhCDR2
GIIPIFGTANYAQKFQG

SEQ ID NO: 292 - protein, 11 aa, Artificial Sequence
  Description of Artificial Sequence: Synthetic peptide
  mAb-42 vhCDR3
GRQMFGAGIDF

SEQ ID NO: 293 - protein, 112 aa, Artificial Sequence
  Description of Artificial Sequence: Synthetic polypeptide
  mAb-42 Variable light (vl) domain
NFMLTQPHSVSESPGKTVTISCTRSSGSIDSNYVQWYQQRPGSAPTTVIYEDNQRPSGVPDRFSGSIDSSSNSASLTISGLKTEDEADYYCQSYDSNNRHVIFGGGTKLTVL

SEQ ID NO: 294 - protein, 13 aa, Artificial Sequence
  Description of Artificial Sequence: Synthetic peptide
  mAb-42 vlCDR1
TRSSGSIDSNYVQ

SEQ ID NO: 295 - protein, 7 aa, Artificial Sequence
  Description of Artificial Sequence: Synthetic peptide
  mAb-42 vlCDR2
EDNQRPS

SEQ ID NO: 296 - protein, 11 aa, Artificial Sequence
  Description of Artificial Sequence: Synthetic peptide
  mAb-42 vlCDR3
QSYDSNNRHVI

SEQ ID NO: 297 - protein, 120 aa, Artificial Sequence
  Description of Artificial Sequence: Synthetic polypeptide
  BAP058-03 Variable heavy (vh) domain
EVQLVQSGAEVKKPGATVKISCKVSGYTFTSYWMYWVRQATGQGLEWMGRIDPNSGSTKYNEKFKNRVTITADKSTSTAYMELSSLRSEDTAVYYCARDYRKGLYAMDYWGQGTTVTVSS

SEQ ID NO: 298 - protein, 5 aa, Artificial Sequence
  Description of Artificial Sequence: Synthetic peptide
  BAP058-03 vhCDR1
SYWMY

SEQ ID NO: 299 - protein, 17 aa, Artificial Sequence
  Description of Artificial Sequence: Synthetic peptide
  BAP058-03 vhCDR2
RIDPNSGSTKYNEKFKN

SEQ ID NO: 300 - protein, 11 aa, Artificial Sequence
  Description of Artificial Sequence: Synthetic peptide
  BAP058-03 vhCDR3
DYRKGLYAMDY

SEQ ID NO: 301 - protein, 107 aa, Artificial Sequence
  Description of Artificial Sequence: Synthetic polypeptide
  BAP058-03 Variable light (vl) domain
EIVLTQSPDFQSVTPKEKVTITCKASQDVGTAVAWYLQKPGQSPQLLIYWASTRHTGVPDRFSGSGSGTDFTLKISRVEAEDVGVYYCQQYNSYPLTFGQGTKVEIK

SEQ ID NO: 302 - protein, 11 aa, Artificial Sequence
  Description of Artificial Sequence: Synthetic peptide
  BAP058-03 vlCDR1
KASQDVGTAVA

SEQ ID NO: 303 - protein, 7 aa, Artificial Sequence
  Description of Artificial Sequence: Synthetic peptide
  BAP058-03 vlCDR2
WASTRHT

SEQ ID NO: 304 - protein, 9 aa, Artificial Sequence
  Description of Artificial Sequence: Synthetic peptide
  BAP058-03 vlCDR3
QQYNSYPLT

SEQ ID NO: 305 - protein, 120 aa, Artificial Sequence
  Description of Artificial Sequence: Synthetic polypeptide
  BAP058-04 Variable heavy (vh) domain
EVQLVQSGAEVKKPGESLRISCKGSGYTFTSYWMYWVRQAPGQGLEWMGRIDPNSGSTKYNEKFKNRVTISVDTSKNQFSLKLSSVTAADTAVYYCARDYRKGLYAMDYWGQGTTVTVSS

SEQ ID NO: 306 - protein, 5 aa, Artificial Sequence
  Description of Artificial Sequence: Synthetic peptide
  BAP058-04 vhCDR1
SYWMY

SEQ ID NO: 307 - protein, 17 aa, Artificial Sequence
  Description of Artificial Sequence: Synthetic peptide
  BAP058-04 vhCDR2
RIDPNSGSTKYNEKFKN

SEQ ID NO: 308 - protein, 11 aa, Artificial Sequence
  Description of Artificial Sequence: Synthetic peptide
  BAP058-04 vhCDR3
DYRKGLYAMDY

SEQ ID NO: 309 - protein, 107 aa, Artificial Sequence
  Description of Artificial Sequence: Synthetic polypeptide
  BAP058-04 Variable light (vl) domain
EIVLTQSPDFQSVTPKEKVTITCKASQDVGTAVAWYLQKPGQSPQLLIYWASTRHTGVPSRFSGSGSGTDFTFTISSLQPEDIATYYCQQYNSYPLTFGQGTKVEIK

SEQ ID NO: 310 - protein, 11 aa, Artificial Sequence
  Description of Artificial Sequence: Synthetic peptide
  BAP058-04 vlCDR1
KASQDVGTAVA

SEQ ID NO: 311 - protein, 7 aa, Artificial Sequence
  Description of Artificial Sequence: Synthetic peptide
  BAP058-04 vlCDR2
WASTRHT

SEQ ID NO: 312 - protein, 9 aa, Artificial Sequence
  Description of Artificial Sequence: Synthetic peptide
  BAP058-04 vlCDR3
QQYNSYPLT

SEQ ID NO: 313 - protein, 120 aa, Artificial Sequence
  Description of Artificial Sequence: Synthetic polypeptide
  BAP058-06 Variable heavy (vh) domain
EVQLVQSGAEVKKPGESLRISCKGSGYTFTSYWMYWIRQPPGKGLEWIGRIDPNSGSTKYNEKFKNRVTITADKSTSTAYMELSSLRSEDTAVYYCARDYRKGLYAMDYWGQGTTVTVSS

SEQ ID NO: 314 - protein, 5 aa, Artificial Sequence
  Description of Artificial Sequence: Synthetic peptide
  BAP058-06 vhCDR1
SYWMY

SEQ ID NO: 315 - protein, 17 aa, Artificial Sequence
  Description of Artificial Sequence: Synthetic peptide
  BAP058-06 vhCDR2
RIDPNSGSTKYNEKFKN

SEQ ID NO: 316 - protein, 11 aa, Artificial Sequence
  Description of Artificial Sequence: Synthetic peptide
  BAP058-06 vhCDR3
DYRKGLYAMDY

SEQ ID NO: 317 - protein, 107 aa, Artificial Sequence; identical to SEQ ID NO: 309
  Description of Artificial Sequence: Synthetic polypeptide
  BAP058-06 Variable light (vl) domain

SEQ ID NO: 318 - protein, 11 aa, Artificial Sequence
  Description of Artificial Sequence: Synthetic peptide
  BAP058-06 vlCDR1
KASQDVGTAVA

SEQ ID NO: 319 - protein, 7 aa, Artificial Sequence
  Description of Artificial Sequence: Synthetic peptide
  BAP058-06 vlCDR2
WASTRHT

SEQ ID NO: 320 - protein, 9 aa, Artificial Sequence
  Description of Artificial Sequence: Synthetic peptide
  BAP058-06 vlCDR3
QQYNSYPLT

SEQ ID NO: 321 - protein, 120 aa, Artificial Sequence
  Description of Artificial Sequence: Synthetic polypeptide
  BAP058-07 Variable heavy (vh) domain
QVQLVQSGAEVKKPGASVKVSCKASGYTFTSYWMYWIRQSPSRGLEWLGRIDPNSGSTKYNEKFKNRFTISRDDSKNTAYLQMNSLKTEDTAVYYCARDYRKGLYAMDYWGQGTTVTVSS

SEQ ID NO: 322 - protein, 5 aa, Artificial Sequence
  Description of Artificial Sequence: Synthetic peptide
  BAP058-07 vhCDR1
SYWMY

SEQ ID NO: 323 - protein, 17 aa, Artificial Sequence
  Description of Artificial Sequence: Synthetic peptide
  BAP058-07 vhCDR2
RIDPNSGSTKYNEKFKN

SEQ ID NO: 324 - protein, 11 aa, Artificial Sequence
  Description of Artificial Sequence: Synthetic peptide
  BAP058-07 vhCDR3
DYRKGLYAMDY

SEQ ID NO: 325 - protein, 107 aa, Artificial Sequence
  Description of Artificial Sequence: Synthetic polypeptide
  BAP058-07 Variable light (vl) domain
EIVLTQSPATLSLSPGERATLSCKASQDVGTAVAWYLQKPGQSPQLLIYWASTRHTGIPPRFSGSGYGTDFTLTINNIESEDAAYYFCQQYNSYPLTFGQGTKVEIK

SEQ ID NO: 326 - protein, 11 aa, Artificial Sequence
  Description of Artificial Sequence: Synthetic peptide
  BAP058-07 vlCDR1
KASQDVGTAVA

SEQ ID NO: 327 - protein, 7 aa, Artificial Sequence
  Description of Artificial Sequence: Synthetic peptide
  BAP058-07 vlCDR2
WASTRHT

SEQ ID NO: 328 - protein, 9 aa, Artificial Sequence
  Description of Artificial Sequence: Synthetic peptide
  BAP058-07 vlCDR3
QQYNSYPLT

SEQ ID NO: 329 - protein, 120 aa, Artificial Sequence; identical to SEQ ID NO: 297
  Description of Artificial Sequence: Synthetic polypeptide
  BAP058-11 Variable heavy (vh) domain

SEQ ID NO: 330 - protein, 5 aa, Artificial Sequence
  Description of Artificial Sequence: Synthetic peptide
  BAP058-11 vhCDR1
SYWMY

SEQ ID NO: 331 - protein, 17 aa, Artificial Sequence
  Description of Artificial Sequence: Synthetic peptide
  BAP058-11 vhCDR2
RIDPNSGSTKYNEKFKN

SEQ ID NO: 332 - protein, 11 aa, Artificial Sequence
  Description of Artificial Sequence: Synthetic peptide
  BAP058-11 vhCDR3
DYRKGLYAMDY

SEQ ID NO: 333 - protein, 107 aa, Artificial Sequence
  Description of Artificial Sequence: Synthetic polypeptide
  BAP058-11 Variable light (vl) domain
DVVMTQSPLSLPVTLGQPASISCKASQDVGTAVAWYQQKPGQAPRLLIYWASTRHTGVPSRFSGSGSGTEFTLTISSLQPDDFATYYCQQYNSYPLTFGQGTKVEIK

SEQ ID NO: 334 - protein, 11 aa, Artificial Sequence
  Description of Artificial Sequence: Synthetic peptide
  BAP058-11 vlCDR1
KASQDVGTAVA

SEQ ID NO: 335 - protein, 7 aa, Artificial Sequence
  Description of Artificial Sequence: Synthetic peptide
  BAP058-11 vlCDR2
WASTRHT

SEQ ID NO: 336 - protein, 9 aa, Artificial Sequence
  Description of Artificial Sequence: Synthetic peptide
  BAP058-11 vlCDR3
QQYNSYPLT

SEQ ID NO: 337 - protein, 120 aa, Artificial Sequence
  Description of Artificial Sequence: Synthetic polypeptide
  BAP058-13 Variable heavy (vh) domain
EVQLVQSGAEVKKPGATVKISCKVSGYTFTSYWMYWVRQARGQRLEWIGRIDPNSGSTKYNEKFKNRFTISRDNSKNTLYLQMNSLRAEDTAVYYCARDYRKGLYAMDYWGQGTTVTVSS

SEQ ID NO: 338 - protein, 5 aa, Artificial Sequence
  Description of Artificial Sequence: Synthetic peptide
  BAP058-13 vhCDR1
SYWMY

SEQ ID NO: 339 - protein, 17 aa, Artificial Sequence
  Description of Artificial Sequence: Synthetic peptide
  BAP058-13 vhCDR2
RIDPNSGSTKYNEKFKN

SEQ ID NO: 340 - protein, 11 aa, Artificial Sequence
  Description of Artificial Sequence: Synthetic peptide
  BAP058-13 vhCDR3
DYRKGLYAMDY

SEQ ID NO: 341 - protein, 107 aa, Artificial Sequence
  Description of Artificial Sequence: Synthetic polypeptide
  BAP058-13 Variable light (vl) domain
AIQLTQSPSSLSASVGDRVTITCKASQDVGTAVAWYLQKPGQSPQLLIYWASTRHTGVPSRFSGSGSGTDFTFTISSLEAEDAATYYCQQYNSYPLTFGQGTKVEIK

SEQ ID NO: 342 - protein, 11 aa, Artificial Sequence
  Description of Artificial Sequence: Synthetic peptide
  BAP058-13 vlCDR1
KASQDVGTAVA

SEQ ID NO: 343 - protein, 7 aa, Artificial Sequence
  Description of Artificial Sequence: Synthetic peptide
  BAP058-13 vlCDR2
WASTRHT

SEQ ID NO: 344 - protein, 9 aa, Artificial Sequence
  Description of Artificial Sequence: Synthetic peptide
  BAP058-13 vlCDR3
QQYNSYPLT

SEQ ID NO: 345 - protein, 121 aa, Artificial Sequence
  Description of Artificial Sequence: Synthetic polypeptide
  H6 Variable heavy (vh) domain
QMQLVQSGAEVKKPGSSVKVSCKASGGTFSSYAISWVRQAPGQGLEWMGGIIPIFGTANYAQKFQGRVTITADESTSTAYMELSSLRSEDTAVYYCARGNIVATITPLDYWGQGTLVTVSS

SEQ ID NO: 346 - protein, 5 aa, Artificial Sequence
  Description of Artificial Sequence: Synthetic peptide
  H6 vhCDR1
SYAIS

SEQ ID NO: 347 - protein, 17 aa, Artificial Sequence
  Description of Artificial Sequence: Synthetic peptide
  H6 vhCDR2
GIIPIFGTANYAQKFQG

SEQ ID NO: 348 - protein, 12 aa, Artificial Sequence
  Description of Artificial Sequence: Synthetic peptide
  H6 vhCDR3
GNIVATITPLDY

SEQ ID NO: 349 - protein, 108 aa, Artificial Sequence
  Description of Artificial Sequence: Synthetic polypeptide
  H6 Variable light (vl) domain
SYELMQPPSVSVAPGKTATIACGGENIGRKTVHWYQQKPGQAPVLVIYYDSDRPSGIPERFSGSNSGNTATLTISRVEAGDEADYYCQVWDSSSDHRIFGGGTKLTVL

SEQ ID NO: 350 - protein, 11 aa, Artificial Sequence
  Description of Artificial Sequence: Synthetic peptide
  H6 vlCDR1
GGENIGRKTVH

SEQ ID NO: 351 - protein, 7 aa, Artificial Sequence
  Description of Artificial Sequence: Synthetic peptide
  H6 vlCDR2
YDSDRPS

SEQ ID NO: 352 - protein, 11 aa, Artificial Sequence
  Description of Artificial Sequence: Synthetic peptide
  H6 vlCDR3
QVWDSSSDHRI

SEQ ID NO: 353 - protein, 121 aa, Artificial Sequence
  Description of Artificial Sequence: Synthetic polypeptide
  RC5 Variable heavy (vh) domain
EVQLLESGGGVVQPGGSLRLSCAASGFTFSSYWMSWVRQAPGKGLEWVANIKQDGSEKYYVDSVKGRFTISRDNSKNTVSLQMNSLRAEDTAVYYCAKDRYYNFPLGMDVWGQGTTVTVSS

SEQ ID NO: 354 - protein, 5 aa, Artificial Sequence
  Description of Artificial Sequence: Synthetic peptide
  RC5 vhCDR1
SYWMS

SEQ ID NO: 355 - protein, 17 aa, Artificial Sequence
  Description of Artificial Sequence: Synthetic peptide
  RC5 vhCDR2
NIKQDGSEKYYVDSVKG

SEQ ID NO: 356 - protein, 12 aa, Artificial Sequence
  Description of Artificial Sequence: Synthetic peptide
  RC5 vhCDR3
DRYYNFPLGMDV

SEQ ID NO: 357 - protein, 107 aa, Artificial Sequence
  Description of Artificial Sequence: Synthetic polypeptide
  RC5 Variable light (vl) domain
AIRMTQSPSSLSASVGDRVTITCRASQSISSYLNWYQQKPGKAPKLLIYTTSSLKSGVPSRFSGSGSGTDFTLTISRLQPEDFATYYCQQSYSSTWTFGRGTKVEIK

SEQ ID NO: 358 - protein, 11 aa, Artificial Sequence
  Description of Artificial Sequence: Synthetic peptide
  RC5 vlCDR1
RASQSISSYLN

SEQ ID NO: 359 - protein, 7 aa, Artificial Sequence
  Description of Artificial Sequence: Synthetic peptide
  RC5 vlCDR2
TTSSLKS

SEQ ID NO: 360 - protein, 9 aa, Artificial Sequence
  Description of Artificial Sequence: Synthetic peptide
  RC5 vlCDR3
QQSYSSTWT

SEQ ID NO: 361 - protein, 123 aa, Artificial Sequence
  Description of Artificial Sequence: Synthetic polypeptide
  SH1A1Q Variable heavy (vh) domain
EVQLVQSGAEVKKPGSSVKVSCKASGGTFSSYAISWVRQAPGQGLEWMGGIIPIFGTANYAQKFQGRVTITADKSTSTAYMELSSLRSEDTAVYYCAREGTIYDSSGYSFDYWGQGTLVTVSS

SEQ ID NO: 362 - protein, 5 aa, Artificial Sequence
  Description of Artificial Sequence: Synthetic peptide
  SH1A1Q vhCDR1
SYAIS

SEQ ID NO: 363 - protein, 17 aa, Artificial Sequence
  Description of Artificial Sequence: Synthetic peptide
  SH1A1Q vhCDR2
GIIPIFGTANYAQKFQG

SEQ ID NO: 364 - protein, 14 aa, Artificial Sequence
  Description of Artificial Sequence: Synthetic peptide
  SH1A1Q vhCDR3
EGTIYDSSGYSFDY

SEQ ID NO: 365 - protein, 110 aa, Artificial Sequence
  Description of Artificial Sequence: Synthetic polypeptide
  SH1A1Q Variable light (vl) domain
QSVLTQPPSVSAAPGQKVTISCSGNNSNIANNYVSWYQQLPGTAPKLLIYDNNYRPSGIPDRFSGSKSGTSATLDITGLQTGDEADYYCGVWDGSLTTGVFGGGTKLTVL

SEQ ID NO: 366 - protein, 13 aa, Artificial Sequence
  Description of Artificial Sequence: Synthetic peptide
  SH1A1Q vlCDR1
SGNNSNIANNYVS

SEQ ID NO: 367 - protein, 7 aa, Artificial Sequence
  Description of Artificial Sequence: Synthetic peptide
  SH1A1Q vlCDR2
DNNYRPS

SEQ ID NO: 368 - protein, 11 aa, Artificial Sequence
  Description of Artificial Sequence: Synthetic peptide
  SH1A1Q vlCDR3
GVWDGSLTTGV

SEQ ID NO: 369 - protein, 118 aa, Artificial Sequence
  Description of Artificial Sequence: Synthetic polypeptide
  SH1B3 Variable heavy (vh) domain
QVQLVESGGGVVQPGRSLRLSCAASGFTFSSYAMHWVRQAPGKGLEWVAVISFDGSNKYYADSVRGRFTISRDNSKNTLYLQMNSLRTEDTAVYYCARGWLDRDIDYWGQGTLVTVSS

SEQ ID NO: 370 - protein, 5 aa, Artificial Sequence
  Description of Artificial Sequence: Synthetic peptide
  SH1B3 vhCDR1
SYAMH

SEQ ID NO: 371 - protein, 17 aa, Artificial Sequence
  Description of Artificial Sequence: Synthetic peptide
  SH1B3 vhCDR2
VISFDGSNKYYADSVRG

SEQ ID NO: 372 - protein, 9 aa, Artificial Sequence
  Description of Artificial Sequence: Synthetic peptide
  SH1B3 vhCDR3
GWLDRDIDY

SEQ ID NO: 373 - protein, 110 aa, Artificial Sequence
  Description of Artificial Sequence: Synthetic polypeptide
  SH1B3 Variable light (vl) domain
LPVLTQPASVSGSPGQSITISCTGTTSDIGGYDYVSWYQQHPGKAPKLMIYDVSKRPSGVSNRFSGSKSGNTASLTISGLQAEDEADYYCSSYTSSSTHVFGTGTKLTVL

SEQ ID NO: 374 - protein, 14 aa, Artificial Sequence
  Description of Artificial Sequence: Synthetic peptide
  SH1B3 vlCDR1
TGTTSDIGGYDYVS

SEQ ID NO: 375 - protein, 7 aa, Artificial Sequence
  Description of Artificial Sequence: Synthetic peptide
  SH1B3 vlCDR2
DVSKRPS

SEQ ID NO: 376 - protein, 10 aa, Artificial Sequence
  Description of Artificial Sequence: Synthetic peptide
  SH1B3 vlCDR3
SSYTSSSTHV

SEQ ID NO: 377 - protein, 118 aa, Artificial Sequence
  Description of Artificial Sequence: Synthetic polypeptide
  SH1D1 Variable heavy (vh) domain
EVQLVESGGGVVQPGRSLRLSCAASGFTFSSYAMHWVRQAPGKGLEWVAVISFDGSNKYYADSVRGRFTISRDNSKNTLYLQMNSLRTEDTAVYYCARGWLDRDIDYWGQGTLVTVSS

SEQ ID NO: 378 - protein, 5 aa, Artificial Sequence
  Description of Artificial Sequence: Synthetic peptide
  SH1D1 vhCDR1
SYAMH

SEQ ID NO: 379 - protein, 17 aa, Artificial Sequence
  Description of Artificial Sequence: Synthetic peptide
  SH1D1 vhCDR2
VISFDGSNKYYADSVRG

SEQ ID NO: 380 - protein, 9 aa, Artificial Sequence
  Description of Artificial Sequence: Synthetic peptide
  SH1D1 vhCDR3
GWLDRDIDY

SEQ ID NO: 381 - protein, 111 aa, Artificial Sequence
  Description of Artificial Sequence: Synthetic polypeptide
  SH1D1 Variable light (vl) domain
QSALTQPASVSGSPGQSITISCTGTSSDVGGYNYVSWYQQHPGKAPKLMIYDVSNRPSGVSNRFSGSKSGNTASLTISGLQAEDEADYYCSSYRSSTLGPVFGGGTKLTVL

SEQ ID NO: 382 - protein, 14 aa, Artificial Sequence
  Description of Artificial Sequence: Synthetic peptide
  SH1D1 vlCDR1
TGTSSDVGGYNYVS

SEQ ID NO: 383 - protein, 7 aa, Artificial Sequence
  Description of Artificial Sequence: Synthetic peptide
  SH1D1 vlCDR2
DVSNRPS

SEQ ID NO: 384 - protein, 11 aa, Artificial Sequence
  Description of Artificial Sequence: Synthetic peptide
  SH1D1 vlCDR3
SSYRSSTLGPV

SEQ ID NO: 385 - protein, 118 aa, Artificial Sequence; identical to SEQ ID NO: 369
  Description of Artificial Sequence: Synthetic polypeptide
  SH1D2 Variable heavy (vh) domain

SEQ ID NO: 386 - protein, 5 aa, Artificial Sequence
  Description of Artificial Sequence: Synthetic peptide
  SH1D2 vhCDR1
SYAMH

SEQ ID NO: 387 - protein, 17 aa, Artificial Sequence
  Description of Artificial Sequence: Synthetic peptide
  SH1D2 vhCDR2
VISFDGSNKYYADSVRG

SEQ ID NO: 388 - protein, 9 aa, Artificial Sequence
  Description of Artificial Sequence: Synthetic peptide
  SH1D2 vhCDR3
GWLDRDIDY

SEQ ID NO: 389 - protein, 110 aa, Artificial Sequence
  Description of Artificial Sequence: Synthetic polypeptide
  SH1D2 Variable light (vl) domain
QAGLTQPPSVSEAPRQRVTISCSGSSSNIGNNAVNWYQQLPGKAPKLLIYYDDLLPSGVSDRFSGSKSGTSASLAISGLQSEDEADYYCAAWDDSLNGYVFGTGTKLTVL

SEQ ID NO: 390 - protein, 13 aa, Artificial Sequence
  Description of Artificial Sequence: Synthetic peptide
  SH1D2 vlCDR1
SGSSSNIGNNAVN

SEQ ID NO: 391 - protein, 7 aa, Artificial Sequence
  Description of Artificial Sequence: Synthetic peptide
  SH1D2 vlCDR2
YDDLLPS

SEQ ID NO: 392 - protein, 11 aa, Artificial Sequence
  Description of Artificial Sequence: Synthetic peptide
  SH1D2 vlCDR3
AAWDDSLNGYV

SEQ ID NO: 393 - protein, 118 aa, Artificial Sequence; identical to SEQ ID NO: 377
  Description of Artificial Sequence: Synthetic polypeptide
  SH1D12 Variable heavy (vh) domain

SEQ ID NO: 394 - protein, 5 aa, Artificial Sequence
  Description of Artificial Sequence: Synthetic peptide
  SH1D12 vhCDR1
SYAMH

SEQ ID NO: 395 - protein, 17 aa, Artificial Sequence
  Description of Artificial Sequence: Synthetic peptide
  SH1D12 vhCDR2
VISFDGSNKYYADSVRG

SEQ ID NO: 396 - protein, 9 aa, Artificial Sequence
  Description of Artificial Sequence: Synthetic peptide
  SH1D12 vhCDR3
GWLDRDIDY

SEQ ID NO: 397 - protein, 110 aa, Artificial Sequence
  Description of Artificial Sequence: Synthetic polypeptide
  SH1D12 Variable light (vl) domain
QSALTQPRSVSGSPGQSVTISCTGTSSDVGGYNYVSWYQQHPGKAPKLMIYDVSKRPSGVPDRFSGSKSGNTASLTISGLQAEDEADYYCSSYTSSTTHVFGTGTKVTVL

SEQ ID NO: 398 - protein, 14 aa, Artificial Sequence
  Description of Artificial Sequence: Synthetic peptide
  SH1D12 vlCDR1
TGTSSDVGGYNYVS

SEQ ID NO: 399 - protein, 7 aa, Artificial Sequence
  Description of Artificial Sequence: Synthetic peptide
  SH1D12 vlCDR2
DVSKRPS

SEQ ID NO: 400 - protein, 10 aa, Artificial Sequence
  Description of Artificial Sequence: Synthetic peptide
  SH1D12 vlCDR3
SSYTSSTTHV

SEQ ID NO: 401 - protein, 118 aa, Artificial Sequence; identical to SEQ ID NO: 377
  Description of Artificial Sequence: Synthetic polypeptide
  SH1E1 Variable heavy (vh) domain

SEQ ID NO: 402 - protein, 5 aa, Artificial Sequence
  Description of Artificial Sequence: Synthetic peptide
  SH1E1 vhCDR1
SYAMH

SEQ ID NO: 403 - protein, 17 aa, Artificial Sequence
  Description of Artificial Sequence: Synthetic peptide
  SH1E1 vhCDR2
VISFDGSNKYYADSVRG

SEQ ID NO: 404 - protein, 9 aa, Artificial Sequence
  Description of Artificial Sequence: Synthetic peptide
  SH1E1 vhCDR3
GWLDRDIDY

SEQ ID NO: 405 - protein, 110 aa, Artificial Sequence
  Description of Artificial Sequence: Synthetic polypeptide
  SH1E1 Variable light (vl) domain
QSVVTQPPSVSAAPGQKVTISCSGSSSNIGNNYVSWYQQLPGTAPKLLIYDNNKRPSGIPDRFSGSKSGTSATLGITGLQTGDEADYYCGTWDSSLSVWVFGGGTQLTVL

SEQ ID NO: 406 - protein, 13 aa, Artificial Sequence
  Description of Artificial Sequence: Synthetic peptide
  SH1E1 vlCDR1
SGSSSNIGNNYVS

SEQ ID NO: 407 - protein, 7 aa, Artificial Sequence
  Description of Artificial Sequence: Synthetic peptide
  SH1E1 vlCDR2
DNNKRPS

SEQ ID NO: 408 - protein, 11 aa, Artificial Sequence
  Description of Artificial Sequence: Synthetic peptide
  SH1E1 vlCDR3
GTWDSSLSVWV

SEQ ID NO: 409 - protein, 118 aa, Artificial Sequence; identical to SEQ ID NO: 369
  Description of Artificial Sequence: Synthetic polypeptide
  SH1G9 Variable heavy (vh) domain

SEQ ID NO: 410 - protein, 5 aa, Artificial Sequence
  Description of Artificial Sequence: Synthetic peptide
  SH1G9 vhCDR1
SYAMH

SEQ ID NO: 411 - protein, 17 aa, Artificial Sequence
  Description of Artificial Sequence: Synthetic peptide
  SH1G9 vhCDR2
VISFDGSNKYYADSVRG

SEQ ID NO: 412 - protein, 9 aa, Artificial Sequence
  Description of Artificial Sequence: Synthetic peptide
  SH1G9 vhCDR3
GWLDRDIDY

SEQ ID NO: 413 - protein, 112 aa, Artificial Sequence
  Description of Artificial Sequence: Synthetic polypeptide
  SH1G9 Variable light (vl) domain
QSVLTQPASVSGSPGQSITISCTGTSSDVGGYNYVSWYQQHPGRAPRLMIYDVSNRPSGVSNRFSGSKSGNTASLTISGLQAEDEGDYYCSSYTSGGTLGPVFGGGTKLTVL

SEQ ID NO: 414 - protein, 14 aa, Artificial Sequence
  Description of Artificial Sequence: Synthetic peptide
  SH1G9 vlCDR1
TGTSSDVGGYNYVS

SEQ ID NO: 415 - protein, 7 aa, Artificial Sequence
  Description of Artificial Sequence: Synthetic peptide
  SH1G9 vlCDR2
DVSNRPS

SEQ ID NO: 416 - protein, 12 aa, Artificial Sequence
  Description of Artificial Sequence: Synthetic peptide
  SH1G9 vlCDR3
SSYTSGGTLGPV

SEQ ID NO: 417 - protein, 120 aa, Artificial Sequence
  Description of Artificial Sequence: Synthetic polypeptide
  SH1E6 Variable heavy (vh) domain
QVQLVQSGAEVKKPGSSVKVSCKASGGTFSRYGVHWVRQAPGQGLEWMGRLIPIVSMTNYAQKFQDRVSITTDKSTGTAYMELRSLTSEDTALYYCASVGQQLPWVFFAWGQGTLVTVSS

SEQ ID NO: 418 - protein, 5 aa, Artificial Sequence
  Description of Artificial Sequence: Synthetic peptide
  SH1E6 vhCDR1
RYGVH

SEQ ID NO: 419 - protein, 17 aa, Artificial Sequence
  Description of Artificial Sequence: Synthetic peptide
  SH1E6 vhCDR2
RLIPIVSMTNYAQKFQD

SEQ ID NO: 420 - protein, 11 aa, Artificial Sequence
  Description of Artificial Sequence: Synthetic peptide
  SH1E6 vhCDR3
VGQQLPWVFFA

SEQ ID NO: 421 - protein, 110 aa, Artificial Sequence
  Description of Artificial Sequence: Synthetic polypeptide
  SH1E6 Variable light (vl) domain
QSVVTQPPSVSAAPGQKVTISCSGSSSNIGNNYVSWYQQLPGTAPKLLIYDNNKRPSGIPDRFSGSKSGTSATLGITGLQTGDEADYYCGTWDSSLSAVVFGGGTKLTVL

SEQ ID NO: 422 - protein, 13 aa, Artificial Sequence
  Description of Artificial Sequence: Synthetic peptide
  SH1E6 vlCDR1
SGSSSNIGNNYVS

SEQ ID NO: 423 - protein, 7 aa, Artificial Sequence
  Description of Artificial Sequence: Synthetic peptide
  SH1E6 vlCDR2
DNNKRPS

SEQ ID NO: 424 - protein, 11 aa, Artificial Sequence
  Description of Artificial Sequence: Synthetic peptide
  SH1E6 vlCDR3
GTWDSSLSAVV

SEQ ID NO: 425 - protein, 118 aa, Artificial Sequence
  Description of Artificial Sequence: Synthetic polypeptide
  SH1A2 Variable heavy (vh) domain
QMQLVQSGGGVVQPGRSLRLSCAASGFTFSSYAMHWVRQAPGKGLEWVAVISFDGSNKYYADSVRGRFTISRDNSKNTLYLQMNSLRTEDTAVYYCARGWLDRDIDYWGQGTLVTVSS

SEQ ID NO: 426 - protein, 5 aa, Artificial Sequence
  Description of Artificial Sequence: Synthetic peptide
  SH1A2 vhCDR1
SYAMH

SEQ ID NO: 427 - protein, 17 aa, Artificial Sequence
  Description of Artificial Sequence: Synthetic peptide
  SH1A2 vhCDR2
VISFDGSNKYYADSVRG

SEQ ID NO: 428 - protein, 9 aa, Artificial Sequence
  Description of Artificial Sequence: Synthetic peptide
  SH1A2 vhCDR3
GWLDRDIDY

SEQ ID NO: 429 - protein, 110 aa, Artificial Sequence
  Description of Artificial Sequence: Synthetic polypeptide
  SH1A2 Variable light (vl) domain
QSVVTQPPSVSAAPGQKVTISCSGSSSNIGNNYVSWYQQVPGTAPKLLIYDNNKRPSGIPDRFSGSNSDTSATLGITGLQTGDEADYYCGTWDSSLSAWVFGGGTKLTVL

SEQ ID NO: 430 - protein, 13 aa, Artificial Sequence
  Description of Artificial Sequence: Synthetic peptide
  SH1A2 vlCDR1
SGSSSNIGNNYVS

SEQ ID NO: 431 - protein, 7 aa, Artificial Sequence
  Description of Artificial Sequence: Synthetic peptide
  SH1A2 vlCDR2
DNNKRPS

SEQ ID NO: 432 - protein, 11 aa, Artificial Sequence
  Description of Artificial Sequence: Synthetic peptide
  SH1A2 vlCDR3
GTWDSSLSAWV

SEQ ID NO: 433 - protein, 118 aa, Artificial Sequence
  Description of Artificial Sequence: Synthetic polypeptide
  SH1B1 Variable heavy (vh) domain
QVQLVQSGGGVVQPGRSLRLSCAASGFTFSSYAMHWVRQAPGKGLEWVAVISFDGSNKYYADSVRGRFTISRDNSKNTLYLQMNSLRTEDTAVYYCARGWLDRDIDYWGQGTLVTVSS

SEQ ID NO: 434 - protein, 5 aa, Artificial Sequence
  Description of Artificial Sequence: Synthetic peptide
  SH1B1 vhCDR1
SYAMH

SEQ ID NO: 435 - protein, 17 aa, Artificial Sequence
  Description of Artificial Sequence: Synthetic peptide
  SH1B1 vhCDR2
VISFDGSNKYYADSVRG

SEQ ID NO: 436 - protein, 9 aa, Artificial Sequence
  Description of Artificial Sequence: Synthetic peptide
  SH1B1 vhCDR3
GWLDRDIDY

SEQ ID NO: 437 - protein, 112 aa, Artificial Sequence
  Description of Artificial Sequence: Synthetic polypeptide
  SH1B1 Variable light (vl) domain
QSVVTQPPSVSAAPGQKVTISCSGSSSNIGNNYVSWYQQLPGTAPKLLIYDNNKRPSGIPDRFSGSKSGTSATLGITGLQTGDEADYYCGTWDSSLSAGSVVFGGGTKLTVL

SEQ ID NO: 438 - protein, 13 aa, Artificial Sequence
  Description of Artificial Sequence: Synthetic peptide
  SH1B1 vlCDR1
SGSSSNIGNNYVS

SEQ ID NO: 439 - protein, 7 aa, Artificial Sequence
  Description of Artificial Sequence: Synthetic peptide
  SH1B1 vlCDR2
DNNKRPS

SEQ ID NO: 440 - protein, 13 aa, Artificial Sequence
  Description of Artificial Sequence: Synthetic peptide
  SH1B1 vlCDR3
GTWDSSLSAGSVV

SEQ ID NO: 441 - protein, 121 aa, Artificial Sequence
  Description of Artificial Sequence: Synthetic polypeptide
  H6B1L Variable heavy (vh) domain
QMQLVQSGAEVKKPGSSVKVSCKASGGTFSSYAYSWVRQAPGQGLEWMGGIIPSFGTANYAQKFQGRVTITADESTSTAYMELSSLRSEDTAVYYCARGPIVATITPLDYWGQGTLVTVSS

SEQ ID NO: 442 - protein, 5 aa, Artificial Sequence
  Description of Artificial Sequence: Synthetic peptide
  H6B1L vhCDR1
SYAYS

SEQ ID NO: 443 - protein, 17 aa, Artificial Sequence
  Description of Artificial Sequence: Synthetic peptide
  H6B1L vhCDR2
GIIPSFGTANYAQKFQG

SEQ ID NO: 444 - protein, 12 aa, Artificial Sequence
  Description of Artificial Sequence: Synthetic peptide
  H6B1L vhCDR3
GPIVATITPLDY

SEQ ID NO: 445 - protein, 108 aa, Artificial Sequence
  Description of Artificial Sequence: Synthetic polypeptide
  H6B1L Variable light (vl) domain
SYELMQPPSVSVAPGKTATIACGGENIGRKTVHWYQQKPGQAPVLVIYYDSDRPSGIPERFSGSNSGNTATLTISRVEAGDEADYYCLVWDSSSDHRIFGGGTKLTVL

SEQ ID NO: 446 - protein, 11 aa, Artificial Sequence
  Description of Artificial Sequence: Synthetic peptide
  H6B1L vlCDR1
GGENIGRKTVH

SEQ ID NO: 447 - protein, 7 aa, Artificial Sequence
  Description of Artificial Sequence: Synthetic peptide
  H6B1L vlCDR2
YDSDRPS

SEQ ID NO: 448 - protein, 11 aa, Artificial Sequence
  Description of Artificial Sequence: Synthetic peptide
  H6B1L vlCDR3
LVWDSSSDHRI

SEQ ID NO: 449 - protein, 121 aa, Artificial Sequence
  Description of Artificial Sequence: Synthetic polypeptide
  H6A1 Variable heavy (vh) domain
QMQLVQSGAEVKKPGSSVKVSCKASGGTFSSYAYSWVRQAPGQGLEWMGGIIPIFGTANYAQKFQGRVTITADESTSTAYMELSSLRSEDTAVYYCARGPIVATITPLDYWGQGTLVTVSS

SEQ ID NO: 450 - protein, 5 aa, Artificial Sequence
  Description of Artificial Sequence: Synthetic peptide
  H6A1 vhCDR1
SYAYS

SEQ ID NO: 451 - protein, 17 aa, Artificial Sequence
  Description of Artificial Sequence: Synthetic peptide
  H6A1 vhCDR2
GIIPIFGTANYAQKFQG

SEQ ID NO: 452 - protein, 12 aa, Artificial Sequence
  Description of Artificial Sequence: Synthetic peptide
  H6A1 vhCDR3
GPIVATITPLDY

SEQ ID NO: 453 - protein, 108 aa, Artificial Sequence; identical to SEQ ID NO: 349
  Description of Artificial Sequence: Synthetic polypeptide
  H6A1 Variable light (vl) domain

SEQ ID NO: 454 - protein, 11 aa, Artificial Sequence
  Description of Artificial Sequence: Synthetic peptide
  H6A1 vlCDR1
GGENIGRKTVH

SEQ ID NO: 455 - protein, 7 aa, Artificial Sequence
  Description of Artificial Sequence: Synthetic peptide
  H6A1 vlCDR2
YDSDRPS

SEQ ID NO: 456 - protein, 11 aa, Artificial Sequence
  Description of Artificial Sequence: Synthetic peptide
  H6A1 vlCDR3
QVWDSSSDHRI

SEQ ID NO: 457 - protein, 121 aa, Artificial Sequence; identical to SEQ ID NO: 441
  Description of Artificial Sequence: Synthetic polypeptide
  H6B1 Variable heavy (vh) domain

SEQ ID NO: 458 - protein, 5 aa, Artificial Sequence
  Description of Artificial Sequence: Synthetic peptide
  H6B1 vhCDR1
SYAYS

SEQ ID NO: 459 - protein, 17 aa, Artificial Sequence
  Description of Artificial Sequence: Synthetic peptide
  H6B1 vhCDR2
GIIPSFGTANYAQKFQG

SEQ ID NO: 460 - protein, 12 aa, Artificial Sequence
  Description of Artificial Sequence: Synthetic peptide
  H6B1 vhCDR3
GPIVATITPLDY

SEQ ID NO: 461 - protein, 108 aa, Artificial Sequence; identical to SEQ ID NO: 349
  Description of Artificial Sequence: Synthetic polypeptide
  H6B1 Variable light (vl) domain

SEQ ID NO: 462 - protein, 11 aa, Artificial Sequence
  Description of Artificial Sequence: Synthetic peptide
  H6B1 vlCDR1
GGENIGRKTVH

SEQ ID NO: 463 - protein, 7 aa, Artificial Sequence
  Description of Artificial Sequence: Synthetic peptide
  H6B1 vlCDR2
YDSDRPS

SEQ ID NO: 464 - protein, 11 aa, Artificial Sequence
  Description of Artificial Sequence: Synthetic peptide
  H6B1 vlCDR3
QVWDSSSDHRI

SEQ ID NO: 465 - protein, 121 aa, Artificial Sequence
  Description of Artificial Sequence: Synthetic polypeptide
  H6B2 Variable heavy (vh) domain
QMQLVQSGAEVKKPGSSVKVSCKASGGTFSSYAISWVRQAPGQGLEWMGGIIPAFGTANYAQKFQGRVTITADESTSTAYMELSSLRSEDTAVYYCARGPIVATITPLDYWGQGTLVTVSS

SEQ ID NO: 466 - protein, 5 aa, Artificial Sequence
  Description of Artificial Sequence: Synthetic peptide
  H6B2 vhCDR1
SYAIS

SEQ ID NO: 467 - protein, 17 aa, Artificial Sequence
  Description of Artificial Sequence: Synthetic peptide
  H6B2 vhCDR2
GIIPAFGTANYAQKFQG

SEQ ID NO: 468 - protein, 12 aa, Artificial Sequence
  Description of Artificial Sequence: Synthetic peptide
  H6B2 vhCDR3
GPIVATITPLDY

SEQ ID NO: 469 - protein, 108 aa, Artificial Sequence; identical to SEQ ID NO: 349
  Description of Artificial Sequence: Synthetic polypeptide
  H6B2 Variable light (vl) domain

SEQ ID NO: 470 - protein, 11 aa, Artificial Sequence
  Description of Artificial Sequence: Synthetic peptide
  H6B2 vlCDR1
GGENIGRKTVH

SEQ ID NO: 471 - protein, 7 aa, Artificial Sequence
  Description of Artificial Sequence: Synthetic peptide
  H6B2 vlCDR2
YDSDRPS

SEQ ID NO: 472 - protein, 11 aa, Artificial Sequence
  Description of Artificial Sequence: Synthetic peptide
  H6B2 vlCDR3
QVWDSSSDHRI

SEQ ID NO: 473 - protein, 118 aa, Artificial Sequence
  Description of Artificial Sequence: Synthetic polypeptide
  G12 Variable heavy (vh) domain
EVQLVQSGAEVKKPGASVKVSCKASGYTFTGYYMHWVRQAPGQGLEWMGWINPNSDNTGSAQKFQGRVFMTKTTSLNTAYMELSGLRSEDTAIYYCARERSSGYFDFWGQGTLVTVSS

SEQ ID NO: 474 - protein, 5 aa, Artificial Sequence
  Description of Artificial Sequence: Synthetic peptide
  G12 vhCDR1
GYYMH

SEQ ID NO: 475 - protein, 17 aa, Artificial Sequence
  Description of Artificial Sequence: Synthetic peptide
  G12 vhCDR2
WINPNSDNTGSAQKFQG

SEQ ID NO: 476 - protein, 9 aa, Artificial Sequence
  Description of Artificial Sequence: Synthetic peptide
  G12 vhCDR3
ERSSGYFDF

SEQ ID NO: 477 - protein, 107 aa, Artificial Sequence
  Description of Artificial Sequence: Synthetic polypeptide
  G12 Variable light (vl) domain
DIVMTQSPSSLSASVGDRVTITCRASQSISSYLNWYQQKPGKAPKLLIYAASSLQSGVPSRFSGSGSGTDFTLTISSLQPEDFATYYCQQSYSTPITFGQGTRLEIK

SEQ ID NO: 478 - protein, 11 aa, Artificial Sequence
  Description of Artificial Sequence: Synthetic peptide
  G12 vlCDR1
RASQSISSYLN

SEQ ID NO: 479 - protein, 7 aa, Artificial Sequence
  Description of Artificial Sequence: Synthetic peptide
  G12 vlCDR2
AASSLQS

SEQ ID NO: 480 - protein, 9 aa, Artificial Sequence
  Description of Artificial Sequence: Synthetic peptide
  G12 vlCDR3
QQSYSTPIT

SEQ ID NO: 481 - protein, 118 aa, Artificial Sequence
  Description of Artificial Sequence: Synthetic polypeptide
  RSA1 Variable heavy (vh) domain
EVQLVQSGGGLVQPGGSLRLSCAASGFTFSSYSMNWVRQAPGKGLEWVSYISSSSSTIYYADSVKGRFTISRDNAKNSLYLQMNSLRDEDTAVYYCARGDYYYGMDVWGQGTTVTVSS

SEQ ID NO: 482 - protein, 5 aa, Artificial Sequence
  Description of Artificial Sequence: Synthetic peptide
  RSA1 vhCDR1
SYSMN

SEQ ID NO: 483 - protein, 17 aa, Artificial Sequence
  Description of Artificial Sequence: Synthetic peptide
  RSA1 vhCDR2
YISSSSSTIYYADSVKG

SEQ ID NO: 484 - protein, 9 aa, Artificial Sequence
  Description of Artificial Sequence: Synthetic peptide
  RSA1 vhCDR3
GDYYYGMDV

SEQ ID NO: 485 - protein, 108 aa, Artificial Sequence
  Description of Artificial Sequence: Synthetic polypeptide
  RSA1 Variable light (vl) domain
NIQMTQSPSSVSASVGDRVTITCRASQDISRWLAWYQQKPGKAPKLLIYAASSLQSGVPSRFSGSGSGTDFALTISSLQPEDFATYYCQQADSFFSITFGQGTRLEIK

SEQ ID NO: 486 - protein, 11 aa, Artificial Sequence
  Description of Artificial Sequence: Synthetic peptide
  RSA1 vlCDR1
RASQDISRWLA

SEQ ID NO: 487 - protein, 7 aa, Artificial Sequence
  Description of Artificial Sequence: Synthetic peptide
  RSA1 vlCDR2
AASSLQS

SEQ ID NO: 488 - protein, 10 aa, Artificial Sequence
  Description of Artificial Sequence: Synthetic peptide
  RSA1 vlCDR3
QQADSFFSIT

SEQ ID NO: 489 - protein, 120 aa, Artificial Sequence
  Description of Artificial Sequence: Synthetic polypeptide
  RA3 Variable heavy (vh) domain
QMQLVQSGAEVKKPGSSVKVSCKASGGTFSRYGVHWVRQAPGQGLEWMGRLIPIVSMTNYAQKFQDRVSITTDKSTGTAYMELRSLTSEDTALYYCASVGQQLPWVFFAWGQGTLVTVSS

SEQ ID NO: 490 - protein, 5 aa, Artificial Sequence
  Description of Artificial Sequence: Synthetic peptide
  RA3 vhCDR1
RYGVH

SEQ ID NO: 491 - protein, 17 aa, Artificial Sequence
  Description of Artificial Sequence: Synthetic peptide
  RA3 vhCDR2
RLIPIVSMTNYAQKFQD

SEQ ID NO: 492 - protein, 11 aa, Artificial Sequence
  Description of Artificial Sequence: Synthetic peptide
  RA3 vhCDR3
VGQQLPWVFFA

SEQ ID NO: 493 - protein, 107 aa, Artificial Sequence
  Description of Artificial Sequence: Synthetic polypeptide
  RA3 Variable light (vl) domain
DIQMTQSPSSLSASVGDRVTITCQASQDISNYLNWYQQKPGKAPKLLIYDASTLQSGVPSRFSGSGSGTDFTLTISSLQPEDFATYYCQQSYSSHWTFGQGTKVEIK

SEQ ID NO: 494 - protein, 11 aa, Artificial Sequence
  Description of Artificial Sequence: Synthetic peptide
  RA3 vlCDR1
QASQDISNYLN

SEQ ID NO: 495 - protein, 7 aa, Artificial Sequence
  Description of Artificial Sequence: Synthetic peptide
  RA3 vlCDR2
DASTLQS

SEQ ID NO: 496 - protein, 9 aa, Artificial Sequence
  Description of Artificial Sequence: Synthetic peptide
  RA3 vlCDR3
QQSYSSHWT

SEQ ID NO: 497 - protein, 119 aa, Artificial Sequence
  Description of Artificial Sequence: Synthetic polypeptide
  SH1E2 Variable heavy (vh) domain
EVQLVESGAEVKKPGSSVKVSCKASGGTFSSYAISWVRQAPGQGLEWMGGIIPIFGTANYAQKFQGRVTITADESTSTAYMELSSLRSEDTAVYYCARAPYYYYYMDVWGQGTTVTVSS

SEQ ID NO: 498 - protein, 5 aa, Artificial Sequence
  Description of Artificial Sequence: Synthetic peptide
  SH1E2 vhCDR1
SYAIS

SEQ ID NO: 499 - protein, 17 aa, Artificial Sequence
  Description of Artificial Sequence: Synthetic peptide
  SH1E2 vhCDR2
GIIPIFGTANYAQKFQG

SEQ ID NO: 500 - protein, 10 aa, Artificial Sequence
  Description of Artificial Sequence: Synthetic peptide
  SH1E2 vhCDR3
APYYYYYMDV

SEQ ID NO: 501 - protein, 109 aa, Artificial Sequence
  Description of Artificial Sequence: Synthetic polypeptide
  SH1E2 Variable light (vl) domain
QSALTQPASVSGSLGQSVTISCTGSSSDVGSYNLVSWYQQHPGKAPNLMIYDVSKRSGVSNRFSGSKSGNTASLTISGLQAEDEADYYCSSYTGISTVVFGGGTKLTVL

SEQ ID NO: 502 - protein, 14 aa, Artificial Sequence
  Description of Artificial Sequence: Synthetic peptide
  SH1E2 vlCDR1
TGSSSDVGSYNLVS

SEQ ID NO: 503 - protein, 6 aa, Artificial Sequence
  Description of Artificial Sequence: Synthetic peptide
  SH1E2 vlCDR2
DVSKRS

SEQ ID NO: 504 - protein, 10 aa, Artificial Sequence
  Description of Artificial Sequence: Synthetic peptide
  SH1E2 vlCDR3
SSYTGISTVV

SEQ ID NO: 505 - protein, 120 aa, Artificial Sequence; identical to SEQ ID NO: 417
  Description of Artificial Sequence: Synthetic polypeptide
  SH1E4 Variable heavy (vh) domain

SEQ ID NO: 506 - protein, 5 aa, Artificial Sequence
  Description of Artificial Sequence: Synthetic peptide
  SH1E4 vhCDR1
RYGVH

SEQ ID NO: 507 - protein, 17 aa, Artificial Sequence
  Description of Artificial Sequence: Synthetic peptide
  SH1E4 vhCDR2
RLIPIVSMTNYAQKFQD

SEQ ID NO: 508 - protein, 11 aa, Artificial Sequence
  Description of Artificial Sequence: Synthetic peptide
  SH1E4 vhCDR3
VGQQLPWVFFA

SEQ ID NO: 509 - protein, 112 aa, Artificial Sequence
  Description of Artificial Sequence: Synthetic polypeptide
  SH1E4 Variable light (vl) domain
QSVLTQPPSASGSPGQSVTISCTGTSSDIGGYDSVSWYQQHPGKAPKLMIYDVSKRPSGVSNRFSGSKSGNTASLTISGLQAEDEADYYCSSYTSSSIFFYVFGTGTKVTVL

SEQ ID NO: 510 - protein, 14 aa, Artificial Sequence
  Description of Artificial Sequence: Synthetic peptide
  SH1E4 vlCDR1
TGTSSDIGGYDSVS

SEQ ID NO: 511 - protein, 7 aa, Artificial Sequence
  Description of Artificial Sequence: Synthetic peptide
  SH1E4 vlCDR2
DVSKRPS

SEQ ID NO: 512 - protein, 12 aa, Artificial Sequence
  Description of Artificial Sequence: Synthetic peptide
  SH1E4 vlCDR3
SSYTSSSIFFYV

SEQ ID NO: 513 - protein, 121 aa, Artificial Sequence
  Description of Artificial Sequence: Synthetic polypeptide
  SH1B11 Variable heavy (vh) domain
QVQLVQSGSELKKPGSSVKVSCKASGYSFSGYYIHWVRQAPGQGLEWMGWIDPNSGVTNYVRRFQGRVTMTRDTSLSTAYMELSGLTADDTAVYYCARDENLWQFGYLDYWGQGTLVTVSS

SEQ ID NO: 514 - protein, 5 aa, Artificial Sequence
  Description of Artificial Sequence: Synthetic peptide
  SH1B11 vhCDR1
GYYIH

SEQ ID NO: 515 - protein, 17 aa, Artificial Sequence
  Description of Artificial Sequence: Synthetic peptide
  SH1B11 vhCDR2
WIDPNSGVTNYVRRFQG

SEQ ID NO: 516 - protein, 12 aa, Artificial Sequence
  Description of Artificial Sequence: Synthetic peptide
  SH1B11 vhCDR3
DENLWQFGYLDY

SEQ ID NO: 517 - protein, 107 aa, Artificial Sequence
  Description of Artificial Sequence: Synthetic polypeptide
  SH1B11 Variable light (vl) domain
DIVMTQSPSSLSASIGDRVTITCRASQRISAYVNWYQQKPGKAPKVLIYAASSLRSGVPSRFSGSGSGTDFTLTISSLQPEDFATYYCQQTYSSPWTFGQGTKVEIK

SEQ ID NO: 518 - protein, 11 aa, Artificial Sequence
  Description of Artificial Sequence: Synthetic peptide
  SH1B11 vlCDR1
RASQRISAYVN

SEQ ID NO: 519 - protein, 7 aa, Artificial Sequence
  Description of Artificial Sequence: Synthetic peptide
  SH1B11 vlCDR2
AASSLRS

SEQ ID NO: 520 - protein, 9 aa, Artificial Sequence
  Description of Artificial Sequence: Synthetic peptide
  SH1B11 vlCDR3
QQTYSSPWT

SEQ ID NO: 521 - protein, 119 aa, Artificial Sequence
  Description of Artificial Sequence: Synthetic polypeptide
  SH1C8 Variable heavy (vh) domain
EVQLVESGGGVVQPGRSLRLSCAASGFTFSSYAMHWVRQAPGKGLEWVAVISYDGSNKYYADSVKGRFTISRDNSKNTLYLQMNSLRAEDTAVYYCARGQWLVTELDYWGQGTLVTVSS

SEQ ID NO: 522 - protein, 5 aa, Artificial Sequence
  Description of Artificial Sequence: Synthetic peptide
  SH1C8 vhCDR1
SYAMH

SEQ ID NO: 523 - protein, 17 aa, Artificial Sequence
  Description of Artificial Sequence: Synthetic peptide
  SH1C8 vhCDR2
VISYDGSNKYYADSVKG

SEQ ID NO: 524 - protein, 10 aa, Artificial Sequence
  Description of Artificial Sequence: Synthetic peptide
  SH1C8 vhCDR3
GQWLVTELDY

SEQ ID NO: 525 - protein, 111 aa, Artificial Sequence
  Description of Artificial Sequence: Synthetic polypeptide
  SH1C8 Variable light (vl) domain
QSVVTQPPSVSAAPGQKVTISCSGSSSDIGNHYVSWYQQLPGTAPKLLIYDNNQRPSGIPDRFSGSKSGTSATLAITGLQTGDEADYYCGTWDNSLSPHLLFGGGTKLTVL

SEQ ID NO: 526 - protein, 13 aa, Artificial Sequence
  Description of Artificial Sequence: Synthetic peptide
  SH1C8 vlCDR1
SGSSSDIGNHYVS

SEQ ID NO: 527 - protein, 7 aa, Artificial Sequence
  Description of Artificial Sequence: Synthetic peptide
  SH1C8 vlCDR2
DNNQRPS

SEQ ID NO: 528 - protein, 12 aa, Artificial Sequence
  Description of Artificial Sequence: Synthetic peptide
  SH1C8 vlCDR3
GTWDNSLSPHLL

SEQ ID NO: 529 - protein, 123 aa, Artificial Sequence
  Description of Artificial Sequence: Synthetic polypeptide
  H1H9364P2 Variable heavy (vh) domain
EVQLVESGGGLVQPGRSLRLSCAASGFTFDDYALHWVRQAPGKGLEWVSGISWTGGTIDYADSVKGRFTISRDNAKNSLYLQMSSLRTEDTAIYYCTRDIRGNWKYGGWFDPWGQGTLVTVSS

SEQ ID NO: 530 - protein, 5 aa, Artificial Sequence
  Description of Artificial Sequence: Synthetic peptide
  H1H9364P2 vhCDR1
DYALH

SEQ ID NO: 531 - protein, 17 aa, Artificial Sequence
  Description of Artificial Sequence: Synthetic peptide
  H1H9364P2 vhCDR2
GISWTGGTIDYADSVKG

SEQ ID NO: 532 - protein, 14 aa, Artificial Sequence
  Description of Artificial Sequence: Synthetic peptide
  H1H9364P2 vhCDR3
DIRGNWKYGGWFDP

SEQ ID NO: 533 - protein, 108 aa, Artificial Sequence
  Description of Artificial Sequence: Synthetic polypeptide
  H1H9364P2 Variable light (vl) domain
DIQMTQSPSSLSASVGDRVTITCRASQSISSYLNWYQQKPGKAPKLLIYAASSLQSGVPSRFSGSGSGTDFTLTISSLQPEDFATYYCQQSYSTPPITFGQGTRLEIK

SEQ ID NO: 534 - protein, 11 aa, Artificial Sequence
  Description of Artificial Sequence: Synthetic peptide
  H1H9364P2 vlCDR1
RASQSISSYLN

SEQ ID NO: 535 - protein, 7 aa, Artificial Sequence
  Description of Artificial Sequence: Synthetic peptide
  H1H9364P2 vlCDR2
AASSLQS

SEQ ID NO: 536 - protein, 10 aa, Artificial Sequence
  Description of Artificial Sequence: Synthetic peptide
  H1H9364P2 vlCDR3
QQSYSTPPIT

SEQ ID NO: 537 - protein, 120 aa, Artificial Sequence
  Description of Artificial Sequence: Synthetic polypeptide
  H1H9373P2 Variable heavy (vh) domain
QVQLVQSGTEVKKPGASVKVSCKASGYTFTAYYMHWVRQAPGQGLDWMGWISPNSGFTNYAQKFQGRVTMTRDTSINTFYMELSGLRSDDTAVYYCAREGSTHHNSFDPWGQGTLVTVSS

SEQ ID NO: 538 - protein, 5 aa, Artificial Sequence
  Description of Artificial Sequence: Synthetic peptide
  H1H9373P2 vhCDR1
AYYMH

SEQ ID NO: 539 - protein, 17 aa, Artificial Sequence
  Description of Artificial Sequence: Synthetic peptide
  H1H9373P2 vhCDR2
WISPNSGFTNYAQKFQG

SEQ ID NO: 540 - protein, 11 aa, Artificial Sequence
  Description of Artificial Sequence: Synthetic peptide
  H1H9373P2 vhCDR3
EGSTHHNSFDP

SEQ ID NO: 541 - protein, 108 aa, Artificial Sequence; identical to SEQ ID NO: 533
  Description of Artificial Sequence: Synthetic polypeptide
  H1H9373P2 Variable light (vl) domain

SEQ ID NO: 542 - protein, 11 aa, Artificial Sequence
  Description of Artificial Sequence: Synthetic peptide
  H1H9373P2 vlCDR1
RASQSISSYLN

SEQ ID NO: 543 - protein, 7 aa, Artificial Sequence
  Description of Artificial Sequence: Synthetic peptide
  H1H9373P2 vlCDR2
AASSLQS

SEQ ID NO: 544 - protein, 10 aa, Artificial Sequence
  Description of Artificial Sequence: Synthetic peptide
  H1H9373P2 vlCDR3
QQSYSTPPIT

SEQ ID NO: 545 - protein, 120 aa, Artificial Sequence
  Description of Artificial Sequence: Synthetic polypeptide
  H1H8314N Variable heavy (vh) domain
EVQLVESGGGVVRPGGSLRLSCAASGFTFDDYGMTWVRQAPGRGLEWVSGIHWHGKRTGYADSVKGRFTISRDNAKKSLYLQMNSLKGEDTALYHCVRGGMSTGDWFDPWGQGTLVIVSS

SEQ ID NO: 546 - protein, 5 aa, Artificial Sequence
  Description of Artificial Sequence: Synthetic peptide
  H1H8314N vhCDR1
DYGMT

SEQ ID NO: 547 - protein, 17 aa, Artificial Sequence
  Description of Artificial Sequence: Synthetic peptide
  H1H8314N vhCDR2
GIHWHGKRTGYADSVKG

SEQ ID NO: 548 - protein, 11 aa, Artificial Sequence
  Description of Artificial Sequence: Synthetic peptide
  H1H8314N vhCDR3
GGMSTGDWFDP

SEQ ID NO: 549 - protein, 108 aa, Artificial Sequence
  Description of Artificial Sequence: Synthetic polypeptide
  H1H8314N Variable light (vl) domain
DIQMTQSPSSLSASLGDRVTITCRASQSINSYLNWYQQKPGKAPKLLIYVASSLQSGVPSRFSGSGSGTEFTLTISNLQPEDFATYYCQQSYSTPPITFGQGTRLEIK

SEQ ID NO: 550 - protein, 11 aa, Artificial Sequence
  Description of Artificial Sequence: Synthetic peptide
  H1H8314N vlCDR1
RASQSINSYLN

SEQ ID NO: 551 - protein, 7 aa, Artificial Sequence
  Description of Artificial Sequence: Synthetic peptide
  H1H8314N vlCDR2
VASSLQS

SEQ ID NO: 552 - protein, 10 aa, Artificial Sequence
  Description of Artificial Sequence: Synthetic peptide
  H1H8314N vlCDR3
QQSYSTPPIT

SEQ ID NO: 553 - protein, 119 aa, Artificial Sequence
  Description of Artificial Sequence: Synthetic polypeptide
  PDL1.3.1 Variable heavy (vh) domain
EVQLQQSGTELVKPGASVKLSCTTSGFNIQDTYMHWVKQRPEQGLEWIGWIDPANGNTKYDPKFQGKATIIADTSSNTAYLQLRGLTSEDTAVYYCARSGVSTAHFDYWGQGTTLTVSS

SEQ ID NO: 554 - protein, 5 aa, Artificial Sequence
  Description of Artificial Sequence: Synthetic peptide
  PDL1.3.1 vhCDR1
DTYMH

SEQ ID NO: 555 - protein, 17 aa, Artificial Sequence
  Description of Artificial Sequence: Synthetic peptide
  PDL1.3.1 vhCDR2
WIDPANGNTKYDPKFQG

SEQ ID NO: 556 - protein, 10 aa, Artificial Sequence
  Description of Artificial Sequence: Synthetic peptide
  PDL1.3.1 vhCDR3
SGVSTAHFDY

SEQ ID NO: 557 - protein, 106 aa, Artificial Sequence
  Description of Artificial Sequence: Synthetic polypeptide
  PDL1.3.1 Variable light (vl) domain
QIVLSQSPAILSASPGEKVTMTCRASSSVSFMHWYQQKPGSSPKPWIYATSNLASGVPTRFSGSGSGTSYSLTLSRVEAEDAATYYCQQWSSYPRTFGGGTKLEIK

SEQ ID NO: 558 - protein, 10 aa, Artificial Sequence
  Description of Artificial Sequence: Synthetic peptide
  PDL1.3.1 vlCDR1
RASSSVSFMH

SEQ ID NO: 559 - protein, 7 aa, Artificial Sequence
  Description of Artificial Sequence: Synthetic peptide
  PDL1.3.1 vlCDR2
ATSNLAS

SEQ ID NO: 560 - protein, 9 aa, Artificial Sequence
  Description of Artificial Sequence: Synthetic peptide
  PDL1.3.1 vlCDR3
QQWSSYPRT

SEQ ID NO: 561 - protein, 121 aa, Artificial Sequence
  Description of Artificial Sequence: Synthetic polypeptide
  1A7[CD28]_H1.1
EVQLLESGGGLVQPGGSLRLSCAASGFTFSSYYMSWVRQAPGKGLEWVSTISGSGDSTYYADSVKGRFTISRDNSKNTLYLQMNSLRAEDTAVYYCAKSGPGLRQVGFDYWGQGTLVTVSS

SEQ ID NO: 562 - protein, 121 aa, Artificial Sequence
  Description of Artificial Sequence: Synthetic polypeptide
  1A7[CD28]_H1.2
EVQLLESGGGLVQPGGSLRLSCAASGFTFSSYAMSWVRQAPGKGLEWVSTIDGSGDSTYYADSVKGRFTISRDNSKNTLYLQMNSLRAEDTAVYYCAKSGPGLRQVGFDYWGQGTLVTVSS

SEQ ID NO: 563 - protein, 121 aa, Artificial Sequence
  Description of Artificial Sequence: Synthetic polypeptide
  1A7[CD28]_H1.3
EVQLLESGGGLVQPGGSLRLSCAASGFTFSSYAMSWVRQAPGKGLEWVSTIEGSGDSTYYADSVKGRFTISRDNSKNTLYLQMNSLRAEDTAVYYCAKSGPGLRQVGFDYWGQGTLVTVSS

SEQ ID NO: 564 - protein, 121 aa, Artificial Sequence
  Description of Artificial Sequence: Synthetic polypeptide
  1A7[CD28]_H1.4
EVQLLESGGGLVQPGGSLRLSCAASGFTFSSYAMSWVRQAPGKGLEWVSTIYGSGDSTYYADSVKGRFTISRDNSKNTLYLQMNSLRAEDTAVYYCAKSGPGLRQVGFDYWGQGTLVTVSS

SEQ ID NO: 565 - protein, 121 aa, Artificial Sequence
  Description of Artificial Sequence: Synthetic polypeptide
  1A7[CD28]_H1.5
EVQLLESGGGLVQPGGSLRLSCAASGFTFSSYAMSWVRQAPGKGLEWVSTISDSGDSTYYADSVKGRFTISRDNSKNTLYLQMNSLRAEDTAVYYCAKSGPGLRQVGFDYWGQGTLVTVSS

SEQ ID NO: 566 - protein, 121 aa, Artificial Sequence
  Description of Artificial Sequence: Synthetic polypeptide
  1A7[CD28]_H1.6
EVQLLESGGGLVQPGGSLRLSCAASGFTFSSYAMSWVRQAPGKGLEWVSTISESGDSTYYADSVKGRFTISRDNSKNTLYLQMNSLRAEDTAVYYCAKSGPGLRQVGFDYWGQGTLVTVSS

SEQ ID NO: 567 - protein, 121 aa, Artificial Sequence
  Description of Artificial Sequence: Synthetic polypeptide
  1A7[CD28]_H1.7
EVQLLESGGGLVQPGGSLRLSCAASGFTFSSYAMSWVRQAPGKGLEWVSTISGSGTSTYYADSVKGRFTISRDNSKNTLYLQMNSLRAEDTAVYYCAKSGPGLRQVGFDYWGQGTLVTVSS

SEQ ID NO: 568 - protein, 121 aa, Artificial Sequence
  Description of Artificial Sequence: Synthetic polypeptide
  1A7[CD28]_H1.8
EVQLLESGGGLVQPGGSLRLSCAASGFTFSSYAMSWVRQAPGKGLEWVSTISGSGYSTYYADSVKGRFTISRDNSKNTLYLQMNSLRAEDTAVYYCAKSGPGLRQVGFDYWGQGTLVTVSS

SEQ ID NO: 569 - protein, 121 aa, Artificial Sequence
  Description of Artificial Sequence: Synthetic polypeptide
  1A7[CD28]_H1.9
EVQLLESGGGLVQPGGSLRLSCAASGFTFSSYAMSWVRQAPGKGLEWVSTISGSGDYTYYADSVKGRFTISRDNSKNTLYLQMNSLRAEDTAVYYCAKSGPGLRQVGFDYWGQGTLVTVSS

SEQ ID NO: 570 - protein, 121 aa, Artificial Sequence
  Description of Artificial Sequence: Synthetic polypeptide
  1A7[CD28]_H1.10
EVQLLESGGGLVQPGGSLRLSCAASGFTFSSYYMSWVRQAPGKGLEWVSTIDGSGDSTYYADSVKGRFTISRDNSKNTLYLQMNSLRAEDTAVYYCAKSGPGLRQVGFDYWGQGTLVTVSS

SEQ ID NO: 571 - protein, 121 aa, Artificial Sequence
  Description of Artificial Sequence: Synthetic polypeptide
  1A7[CD28]_H1.11
EVQLLESGGGLVQPGGSLRLSCAASGFTFSSYYMSWVRQAPGKGLEWVSTIEGSGDSTYYADSVKGRFTISRDNSKNTLYLQMNSLRAEDTAVYYCAKSGPGLRQVGFDYWGQGTLVTVSS

SEQ ID NO: 572 - protein, 121 aa, Artificial Sequence
  Description of Artificial Sequence: Synthetic polypeptide
  1A7[CD28]_H1.12
EVQLLESGGGLVQPGGSLRLSCAASGFTFSSYYMSWVRQAPGKGLEWVSTIYGSGDSTYYADSVKGRFTISRDNSKNTLYLQMNSLRAEDTAVYYCAKSGPGLRQVGFDYWGQGTLVTVSS

SEQ ID NO: 573 - protein, 121 aa, Artificial Sequence
  Description of Artificial Sequence: Synthetic polypeptide
  1A7[CD28]_H1.13
EVQLLESGGGLVQPGGSLRLSCAASGFTFSSYYMSWVRQAPGKGLEWVSTISDSGDSTYYADSVKGRFTISRDNSKNTLYLQMNSLRAEDTAVYYCAKSGPGLRQVGFDYWGQGTLVTVSS

SEQ ID NO: 574 - protein, 121 aa, Artificial Sequence
  Description of Artificial Sequence: Synthetic polypeptide
  1A7[CD28]_H1.14
EVQLLESGGGLVQPGGSLRLSCAASGFTFSSYYMSWVRQAPGKGLEWVSTISESGDSTYYADSVKGRFTISRDNSKNTLYLQMNSLRAEDTAVYYCAKSGPGLRQVGFDYWGQGTLVTVSS

SEQ ID NO: 575 - protein, 121 aa, Artificial Sequence
  Description of Artificial Sequence: Synthetic polypeptide
  1A7[CD28]_H1.15
EVQLLESGGGLVQPGGSLRLSCAASGFTFSSYYMSWVRQAPGKGLEWVSTISGSGTSTYYADSVKGRFTISRDNSKNTLYLQMNSLRAEDTAVYYCAKSGPGLRQVGFDYWGQGTLVTVSS

SEQ ID NO: 576 - protein, 121 aa, Artificial Sequence
  Description of Artificial Sequence: Synthetic polypeptide
  1A7[CD28]_H1.16
EVQLLESGGGLVQPGGSLRLSCAASGFTFSSYYMSWVRQAPGKGLEWVSTISGSGYSTYYADSVKGRFTISRDNSKNTLYLQMNSLRAEDTAVYYCAKSGPGLRQVGFDYWGQGTLVTVSS

SEQ ID NO: 577 - protein, 121 aa, Artificial Sequence
  Description of Artificial Sequence: Synthetic polypeptide
  1A7[CD28]_H1.17
EVQLLESGGGLVQPGGSLRLSCAASGFTFSSYYMSWVRQAPGKGLEWVSTISGSGDYTYYADSVKGRFTISRDNSKNTLYLQMNSLRAEDTAVYYCAKSGPGLRQVGFDYWGQGTLVTVSS

SEQ ID NO: 578 - protein, 121 aa, Artificial Sequence
  Description of Artificial Sequence: Synthetic polypeptide
  1A7[CD28]_H1.18
EVQLLESGGGLVQPGGSLRLSCAASGFTFSSYAMSWVRQAPGKGLEWVSTIDDSGDSTYYADSVKGRFTISRDNSKNTLYLQMNSLRAEDTAVYYCAKSGPGLRQVGFDYWGQGTLVTVSS

SEQ ID NO: 579 - protein, 121 aa, Artificial Sequence
  Description of Artificial Sequence: Synthetic polypeptide
  1A7[CD28]_H1.19
EVQLLESGGGLVQPGGSLRLSCAASGFTFSSYAMSWVRQAPGKGLEWVSTIDESGDSTYYADSVKGRFTISRDNSKNTLYLQMNSLRAEDTAVYYCAKSGPGLRQVGFDYWGQGTLVTVSS

SEQ ID NO: 580 - protein, 121 aa, Artificial Sequence
  Description of Artificial Sequence: Synthetic polypeptide
  1A7[CD28]_H1.20
EVQLLESGGGLVQPGGSLRLSCAASGFTFSSYAMSWVRQAPGKGLEWVSTIDGSGTSTYYADSVKGRFTISRDNSKNTLYLQMNSLRAEDTAVYYCAKSGPGLRQVGFDYWGQGTLVTVSS

SEQ ID NO: 581 - protein, 121 aa, Artificial Sequence
  Description of Artificial Sequence: Synthetic polypeptide
  1A7[CD28]_H1.21
EVQLLESGGGLVQPGGSLRLSCAASGFTFSSYAMSWVRQAPGKGLEWVSTIDGSGYSTYYADSVKGRFTISRDNSKNTLYLQMNSLRAEDTAVYYCAKSGPGLRQVGFDYWGQGTLVTVSS

SEQ ID NO: 582 - protein, 121 aa, Artificial Sequence
  Description of Artificial Sequence: Synthetic polypeptide
  1A7[CD28]_H1.22
EVQLLESGGGLVQPGGSLRLSCAASGFTFSSYAMSWVRQAPGKGLEWVSTIDGSGDYTYYADSVKGRFTISRDNSKNTLYLQMNSLRAEDTAVYYCAKSGPGLRQVGFDYWGQGTLVTVSS

SEQ ID NO: 583 - protein, 121 aa, Artificial Sequence
  Description of Artificial Sequence: Synthetic polypeptide
  1A7[CD28]_H1.23
EVQLLESGGGLVQPGGSLRLSCAASGFTFSSYAMSWVRQAPGKGLEWVSTIEDSGDSTYYADSVKGRFTISRDNSKNTLYLQMNSLRAEDTAVYYCAKSGPGLRQVGFDYWGQGTLVTVSS

SEQ ID NO: 584 - protein, 121 aa, Artificial Sequence
  Description of Artificial Sequence: Synthetic polypeptide
  1A7[CD28]_H1.24
EVQLLESGGGLVQPGGSLRLSCAASGFTFSSYAMSWVRQAPGKGLEWVSTIEESGDSTYYADSVKGRFTISRDNSKNTLYLQMNSLRAEDTAVYYCAKSGPGLRQVGFDYWGQGTLVTVSS

SEQ ID NO: 585 - protein, 121 aa, Artificial Sequence
  Description of Artificial Sequence: Synthetic polypeptide
  1A7[CD28]_H1.25
EVQLLESGGGLVQPGGSLRLSCAASGFTFSSYAMSWVRQAPGKGLEWVSTIEGSGTSTYYADSVKGRFTISRDNSKNTLYLQMNSLRAEDTAVYYCAKSGPGLRQVGFDYWGQGTLVTVSS

SEQ ID NO: 586 - protein, 121 aa, Artificial Sequence
  Description of Artificial Sequence: Synthetic polypeptide
  1A7[CD28]_H1.26
EVQLLESGGGLVQPGGSLRLSCAASGFTFSSYAMSWVRQAPGKGLEWVSTIEGSGYSTYYADSVKGRFTISRDNSKNTLYLQMNSLRAEDTAVYYCAKSGPGLRQVGFDYWGQGTLVTVSS

SEQ ID NO: 587 - protein, 121 aa, Artificial Sequence
  Description of Artificial Sequence: Synthetic polypeptide
  1A7[CD28]_H1.27
EVQLLESGGGLVQPGGSLRLSCAASGFTFSSYAMSWVRQAPGKGLEWVSTIEGSGDYTYYADSVKGRFTISRDNSKNTLYLQMNSLRAEDTAVYYCAKSGPGLRQVGFDYWGQGTLVTVSS

SEQ ID NO: 588 - protein, 121 aa, Artificial Sequence
  Description of Artificial Sequence: Synthetic polypeptide
  1A7[CD28]_H1.28
EVQLLESGGGLVQPGGSLRLSCAASGFTFSSYAMSWVRQAPGKGLEWVSTIYDSGDSTYYADSVKGRFTISRDNSKNTLYLQMNSLRAEDTAVYYCAKSGPGLRQVGFDYWGQGTLVTVSS

SEQ ID NO: 589 - protein, 121 aa, Artificial Sequence
  Description of Artificial Sequence: Synthetic polypeptide
  1A7[CD28]_H1.29
EVQLLESGGGLVQPGGSLRLSCAASGFTFSSYAMSWVRQAPGKGLEWVSTIYESGDSTYYADSVKGRFTISRDNSKNTLYLQMNSLRAEDTAVYYCAKSGPGLRQVGFDYWGQGTLVTVSS

SEQ ID NO: 590 - protein, 121 aa, Artificial Sequence
  Description of Artificial Sequence: Synthetic polypeptide
  1A7[CD28]_H1.30
EVQLLESGGGLVQPGGSLRLSCAASGFTFSSYAMSWVRQAPGKGLEWVSTIYGSGTSTYYADSVKGRFTISRDNSKNTLYLQMNSLRAEDTAVYYCAKSGPGLRQVGFDYWGQGTLVTVSS

SEQ ID NO: 591 - protein, 121 aa, Artificial Sequence
  Description of Artificial Sequence: Synthetic polypeptide
  1A7[CD28]_H1.31
EVQLLESGGGLVQPGGSLRLSCAASGFTFSSYAMSWVRQAPGKGLEWVSTIYGSGYSTYYADSVKGRFTISRDNSKNTLYLQMNSLRAEDTAVYYCAKSGPGLRQVGFDYWGQGTLVTVSS

SEQ ID NO: 592 - protein, 121 aa, Artificial Sequence
  Description of Artificial Sequence: Synthetic polypeptide
  1A7[CD28]_H1.32
EVQLLESGGGLVQPGGSLRLSCAASGFTFSSYAMSWVRQAPGKGLEWVSTIYGSGDYTYYADSVKGRFTISRDNSKNTLYLQMNSLRAEDTAVYYCAKSGPGLRQVGFDYWGQGTLVTVSS

SEQ ID NO: 593 - protein, 121 aa, Artificial Sequence
  Description of Artificial Sequence: Synthetic polypeptide
  1A7[CD28]_H1.33
EVQLLESGGGLVQPGGSLRLSCAASGFTFSSYAMSWVRQAPGKGLEWVSTISDSGTSTYYADSVKGRFTISRDNSKNTLYLQMNSLRAEDTAVYYCAKSGPGLRQVGFDYWGQGTLVTVSS

SEQ ID NO: 594 - protein, 121 aa, Artificial Sequence
  Description of Artificial Sequence: Synthetic polypeptide
  1A7[CD28]_H1.34
EVQLLESGGGLVQPGGSLRLSCAASGFTFSSYAMSWVRQAPGKGLEWVSTISDSGYSTYYADSVKGRFTISRDNSKNTLYLQMNSLRAEDTAVYYCAKSGPGLRQVGFDYWGQGTLVTVSS

SEQ ID NO: 595 - protein, 121 aa, Artificial Sequence
  Description of Artificial Sequence: Synthetic polypeptide
  1A7[CD28]_H1.35
EVQLLESGGGLVQPGGSLRLSCAASGFTFSSYAMSWVRQAPGKGLEWVSTISDSGDYTYYADSVKGRFTISRDNSKNTLYLQMNSLRAEDTAVYYCAKSGPGLRQVGFDYWGQGTLVTVSS

SEQ ID NO: 596 - protein, 121 aa, Artificial Sequence
  Description of Artificial Sequence: Synthetic polypeptide
  1A7[CD28]_H1.36
EVQLLESGGGLVQPGGSLRLSCAASGFTFSSYAMSWVRQAPGKGLEWVSTISESGTSTYYADSVKGRFTISRDNSKNTLYLQMNSLRAEDTAVYYCAKSGPGLRQVGFDYWGQGTLVTVSS

SEQ ID NO: 597 - protein, 121 aa, Artificial Sequence
  Description of Artificial Sequence: Synthetic polypeptide
  1A7[CD28]_H1.37
EVQLLESGGGLVQPGGSLRLSCAASGFTFSSYAMSWVRQAPGKGLEWVSTISESGYSTYYADSVKGRFTISRDNSKNTLYLQMNSLRAEDTAVYYCAKSGPGLRQVGFDYWGQGTLVTVSS

SEQ ID NO: 598 - protein, 121 aa, Artificial Sequence
  Description of Artificial Sequence: Synthetic polypeptide
  1A7[CD28]_H1.38
EVQLLESGGGLVQPGGSLRLSCAASGFTFSSYAMSWVRQAPGKGLEWVSTISESGDYTYYADSVKGRFTISRDNSKNTLYLQMNSLRAEDTAVYYCAKSGPGLRQVGFDYWGQGTLVTVSS

SEQ ID NO: 599 - protein, 121 aa, Artificial Sequence
  Description of Artificial Sequence: Synthetic polypeptide
  1A7[CD28]_H1.39
EVQLLESGGGLVQPGGSLRLSCAASGFTFSSYAMSWVRQAPGKGLEWVSTISGSGTYTYYADSVKGRFTISRDNSKNTLYLQMNSLRAEDTAVYYCAKSGPGLRQVGFDYWGQGTLVTVSS

SEQ ID NO: 600 - protein, 121 aa, Artificial Sequence
  Description of Artificial Sequence: Synthetic polypeptide
  1A7[CD28]_H1.40
EVQLLESGGGLVQPGGSLRLSCAASGFTFSSYAMSWVRQAPGKGLEWVSTISGSGYYTYYADSVKGRFTISRDNSKNTLYLQMNSLRAEDTAVYYCAKSGPGLRQVGFDYWGQGTLVTVSS

SEQ ID NO: 601 - protein, 121 aa, Artificial Sequence
  Description of Artificial Sequence: Synthetic polypeptide
  1A7[CD28]_H1.41
EVQLLESGGGLVQPGGSLRLSCAASGFTFSSYYMSWVRQAPGKGLEWVSTIEGSGDYTYYADSVKGRFTISRDNSKNTLYLQMNSLRAEDTAVYYCAKSGPGLRQVGFDYWGQGTLVTVSS

SEQ ID NO: 602 - protein, 121 aa, Artificial Sequence
  Description of Artificial Sequence: Synthetic polypeptide
  1A7[CD28]_H1.42
EVQLLESGGGLVQPGGSLRLSCAASGFTFSSYYMSWVRQAPGKGLEWVSTISESGDYTYYADSVKGRFTISRDNSKNTLYLQMNSLRAEDTAVYYCAKSGPGLRQVGFDYWGQGTLVTVSS

SEQ ID NO: 603 - protein, 121 aa, Artificial Sequence
  Description of Artificial Sequence: Synthetic polypeptide
  1A7[CD28]_H1.43
EVQLLESGGGLVQPGGSLRLSCAASGFSFSGNYMTWVRQAPGKGLEWVATITADSDATYYADSVKGRFTISRDNSKNTLYLQMNSLRAEDTAVYYCAKSGPGLRQVGFDYWGQGTLVTVSS

SEQ ID NO: 604 - protein, 121 aa, Artificial Sequence
  Description of Artificial Sequence: Synthetic polypeptide
  1A7[CD28]_H1.44
EVQLLESGGGLVQPGGSLRLSCAASGFTFSGYSMNWVRQAPGKGLEWVATIYANGSYTYYADSVKGRFTISRDNSKNTLYLQMNSLRAEDTAVYYCAKSGPGLRQVGFDYWGQGTLVTVSS

SEQ ID NO: 605 - protein, 121 aa, Artificial Sequence
  Description of Artificial Sequence: Synthetic polypeptide
  1A7[CD28]_H1.45
EVQLLESGGGLVQPGGSLRLSCAASGFNFEEYSMNWVRQAPGKGLEWVATITYNGDYTYYADSVKGRFTISRDNSKNTLYLQMNSLRAEDTAVYYCAKSGPGLRQVGFDYWGQGTLVTVSS

SEQ ID NO: 606 - protein, 121 aa, Artificial Sequence
  Description of Artificial Sequence: Synthetic polypeptide
  1A7[CD28]_H1.46
EVQLLESGGGLVQPGGSLRLSCAASGFSFRTYYMTWVRQAPGKGLEWVATITSDGDYTYYADSVKGRFTISRDNSKNTLYLQMNSLRAEDTAVYYCAKSGPGLRQVGFDYWGQGTLVTVSS

SEQ ID NO: 607 - protein, 121 aa, Artificial Sequence
  Description of Artificial Sequence: Synthetic polypeptide
  1A7[CD28]_H1.47
EVQLLESGGGLVQPGGSLRLSCAASGFSFKGYSMNWVRQAPGKGLEWVATIYASSDSTYYADSVKGRFTISRDNSKNTLYLQMNSLRAEDTAVYYCAKSGPGLRQVGFDYWGQGTLVTVSS

SEQ ID NO: 608 - protein, 121 aa, Artificial Sequence
  Description of Artificial Sequence: Synthetic polypeptide
  1A7[CD28]_H1.48
EVQLLESGGGLVQPGGSLRLSCAASGFSFGEYSMNWVRQAPGKGLEWVSTIYADGDYTYYADSVKGRFTISRDNSKNTLYLQMNSLRAEDTAVYYCAKSGPGLRQVGFDYWGQGTLVTVSS

SEQ ID NO: 609 - protein, 121 aa, Artificial Sequence
  Description of Artificial Sequence: Synthetic polypeptide
  1A7[CD28]_H1.49
EVQLLESGGGLVQPGGSLRLSCAASGFTFTDYSMNWVRQAPGKGLEWVATIYADSSSTYYADSVKGRFTISRDNSKNTLYLQMNSLRAEDTAVYYCAKSGPGLRQVGFDYWGQGTLVTVSS

SEQ ID NO: 610 - protein, 121 aa, Artificial Sequence
  Description of Artificial Sequence: Synthetic polypeptide
  1A7[CD28]_H1.50
EVQLLESGGGLVQPGGSLRLSCAASGFTFGGYSMNWVRQAPGKGLEWVATIYYDSTTTYYADSVKGRFTISRDNSKNTLYLQMNSLRAEDTAVYYCAKSGPGLRQVGFDYWGQGTLVTVSS

SEQ ID NO: 611 - protein, 121 aa, Artificial Sequence
  Description of Artificial Sequence: Synthetic polypeptide
  1A7[CD28]_H1.51
EVQLLESGGGLVQPGGSLRLSCAASGFTFGAYSMNWVRQAPGKGLEWVSTIYNDGATTYYADSVKGRFTISRDNSKNTLYLQMNSLRAEDTAVYYCAKSGPGLRQVGFDYWGQGTLVTVSS

SEQ ID NO: 612 - protein, 121 aa, Artificial Sequence
  Description of Artificial Sequence: Synthetic polypeptide
  1A7[CD28]_H1.52
EVQLLESGGGLVQPGGSLRLSCAASGFSFEAYSMNWVRQAPGKGLEWVATIYYDSSYTYYADSVKGRFTISRDNSKNTLYLQMNSLRAEDTAVYYCAKSGPGLRQVGFDYWGQGTLVTVSS

SEQ ID NO: 613 - protein, 121 aa, Artificial Sequence
  Description of Artificial Sequence: Synthetic polypeptide
  1A7[CD28]_H1.53
EVQLLESGGGLVQPGGSLRLSCAASGFSFGSYYMSWVRQAPGKGLEWVASIYYGGYDTYYADSVKGRFTISRDNSKNTLYLQMNSLRAEDTAVYYCAKSGPGLRQVGFDYWGQGTLVTVSS

SEQ ID NO: 614 - protein, 121 aa, Artificial Sequence
  Description of Artificial Sequence: Synthetic polypeptide
  1A7[CD28]_H1.54
EVQLLESGGGLVQPGGSLRLSCAASGFNFAEYSMSWVRQAPGKGLEWVATIYAGSDYTYYADSVKGRFTISRDNSKNTLYLQMNSLRAEDTAVYYCAKSGPGLRQVGFDYWGQGTLVTVSS

SEQ ID NO: 615 - protein, 121 aa, Artificial Sequence
  Description of Artificial Sequence: Synthetic polypeptide
  1A7[CD28]_H1.55
EVQLLESGGGLVQPGGSLRLSCAASGFTFGAYSINWVRQAPGKGLEWVATIYYDGSYTYYADSVKGRFTISRDNSKNTLYLQMNSLRAEDTAVYYCAKSGPGLRQVGFDYWGQGTLVTVSS

SEQ ID NO: 616 - protein, 121 aa, Artificial Sequence
  Description of Artificial Sequence: Synthetic polypeptide
  1A7[CD28]_H1.56
EVQLLESGGGLVQPGGSLRLSCAASGFTFSRYYINWVRQAPGKGLEWVASIYDGGADTYYADSVKGRFTISRDNSKNTLYLQMNSLRAEDTAVYYCAKSGPGLRQVGFDYWGQGTLVTVSS

SEQ ID NO: 617 - protein, 121 aa, Artificial Sequence
  Description of Artificial Sequence: Synthetic polypeptide
  1A7[CD28]_H1.57
EVQLLESGGGLVQPGGSLRLSCAASGFSFGTYSINWVRQAPGKGLEWVSTIYYDGASTYYADSVKGRFTISRDNSKNTLYLQMNSLRAEDTAVYYCAKSGPGLRQVGFDYWGQGTLVTVSS

SEQ ID NO: 618 - protein, 121 aa, Artificial Sequence
  Description of Artificial Sequence: Synthetic polypeptide
  1A7[CD28]_H1.58
EVQLLESGGGLVQPGGSLRLSCAASGFTFGKYSISWVRQAPGKGLEWVATIYNDGYYTYYADSVKGRFTISRDNSKNTLYLQMNSLRAEDTAVYYCAKSGPGLRQVGFDYWGQGTLVTVSS

SEQ ID NO: 619 - protein, 121 aa, Artificial Sequence
  Description of Artificial Sequence: Synthetic polypeptide
  1A7[CD28]_H1.59
EVQLLESGGGLVQPGGSLRLSCAASGFSFEKYYISWVRQAPGKGLEWVASIYDGSYDTYYADSVKGRFTISRDNSKNTLYLQMNSLRAEDTAVYYCAKSGPGLRQVGFDYWGQGTLVTVSS

SEQ ID NO: 620 - protein, 121 aa, Artificial Sequence
  Description of Artificial Sequence: Synthetic polypeptide
  1A7[CD28]_H1.60
EVQLLESGGGLVQPGGSLRLSCAASGFSFGTYSMNWVRQAPGKGLEWVATIDYDGSNTYYADSVKGRFTISRDNSKNTLYLQMNSLRAEDTAVYYCAKSGPGLRQVGFDYWGQGTLVTVSS

SEQ ID NO: 621 - protein, 121 aa, Artificial Sequence
  Description of Artificial Sequence: Synthetic polypeptide
  1A7[CD28]_H1.61
EVQLLESGGGLVQPGGSLRLSCAASGFSFAAYSMSWVRQAPGKGLEWVATIYAGSDYTYYADSVKGRFTISRDNSKNTLYLQMNSLRAEDTAVYYCAKSGPGLRQVGFDYWGQGTLVTVSS

SEQ ID NO: 622 - protein, 121 aa, Artificial Sequence
  Description of Artificial Sequence: Synthetic polypeptide
  1A7[CD28]_H1.62
EVQLLESGGGLVQPGGSLRLSCAASGFTFTTYSMTWVRQAPGKGLEWVATIYNDGYYTYYADSVKGRFTISRDNSKNTLYLQMNSLRAEDTAVYYCAKSGPGLRQVGFDYWGQGTLVTVSS

SEQ ID NO: 623 - protein, 121 aa, Artificial Sequence
  Description of Artificial Sequence: Synthetic polypeptide
  1A7[CD28]_H1.63
EVQLLESGGGLVQPGGSLRLSCAASGFSFKDYSMNWVRQAPGKGLEWVATIYYDGTYTYYADSVKGRFTISRDNSKNTLYLQMNSLRAEDTAVYYCAKSGPGLRQVGFDYWGQGTLVTVSS

SEQ ID NO: 624 - protein, 121 aa, Artificial Sequence
  Description of Artificial Sequence: Synthetic polypeptide
  1A7[CD28]_H1.64
EVQLLESGGGLVQPGGSLRLSCAASGFSFAAYSMNWVRQAPGKGLEWVATIYAGGAYTYYADSVKGRFTISRDNSKNTLYLQMNSLRAEDTAVYYCAKSGPGLRQVGFDYWGQGTLVTVSS

SEQ ID NO: 625 - protein, 121 aa, Artificial Sequence
  Description of Artificial Sequence: Synthetic polypeptide
  1A7[CD28]_H1.65
EVQLLESGGGLVQPGGSLRLSCAASGFNFAEYYISWVRQAPGKGLEWVASIYNGGSDTYYADSVKGRFTISRDNSKNTLYLQMNSLRAEDTAVYYCAKSGPGLRQVGFDYWGQGTLVTVSS

SEQ ID NO: 626 - protein, 121 aa, Artificial Sequence
  Description of Artificial Sequence: Synthetic polypeptide
  1A7[CD28]_H1.66
EVQLLESGGGLVQPGGSLRLSCAASGFSLGEYYMNWVRQAPGKGLEWVSTIDYDGTYTYYADSVKGRFTISRDNSKNTLYLQMNSLRAEDTAVYYCAKSGPGLRQVGFDYWGQGTLVTVSS

SEQ ID NO: 627 - protein, 121 aa, Artificial Sequence
  Description of Artificial Sequence: Synthetic polypeptide
  1A7[CD28]_H1.67
EVQLLESGGGLVQPGGSLRLSCAASGFTFNEYYITWVRQAPGKGLEWVSSIYSSSYDTYYADSVKGRFTISRDNSKNTLYLQMNSLRAEDTAVYYCAKSGPGLRQVGFDYWGQGTLVTVSS

SEQ ID NO: 628 - protein, 121 aa, Artificial Sequence
  Description of Artificial Sequence: Synthetic polypeptide
  1A7[CD28]_H1.68
EVQLLESGGGLVQPGGSLRLSCAASGFTFKDYYITWVRQAPGKGLEWVSSIYTSGYDTYYADSVKGRFTISRDNSKNTLYLQMNSLRAEDTAVYYCAKSGPGLRQVGFDYWGQGTLVTVSS

SEQ ID NO: 629 - protein, 121 aa, Artificial Sequence
  Description of Artificial Sequence: Synthetic polypeptide
  1A7[CD28]_H1.69
EVQLLESGGGLVQPGGSLRLSCAASGFSFGKYSINWVRQAPGKGLEWVATIYSDGTDTYYADSVKGRFTISRDNSKNTLYLQMNSLRAEDTAVYYCAKSGPGLRQVGFDYWGQGTLVTVSS

SEQ ID NO: 630 - protein, 107 aa, Artificial Sequence
  Description of Artificial Sequence: Synthetic polypeptide
  1A7[CD28]_L1.1
DIQMTQSPSSLSASVGDRVTITCRASQSISAYLNWYQQKPGKAPKLLIYAASSLQSGVPSRFSGSGSGTDFTLTISSLQPEDFATYYCQQSYSTPFTFGQGTKLEIK

SEQ ID NO: 631 - protein, 107 aa, Artificial Sequence
  Description of Artificial Sequence: Synthetic polypeptide
  1A7[CD28]_L1.2
DIQMTQSPSSLSASVGDRVTITCRASQSISDYLNWYQQKPGKAPKLLIYAASSLQSGVPSRFSGSGSGTDFTLTISSLQPEDFATYYCQQSYSTPFTFGQGTKLEIK

SEQ ID NO: 632 - protein, 107 aa, Artificial Sequence
  Description of Artificial Sequence: Synthetic polypeptide
  1A7[CD28]_L1.3
DIQMTQSPSSLSASVGDRVTITCRASQSISGYLNWYQQKPGKAPKLLIYAASSLQSGVPSRFSGSGSGTDFTLTISSLQPEDFATYYCQQSYSTPFTFGQGTKLEIK

SEQ ID NO: 633 - protein, 107 aa, Artificial Sequence
  Description of Artificial Sequence: Synthetic polypeptide
  1A7[CD28]_L1.4
DIQMTQSPSSLSASVGDRVTITCRASQSISHYLNWYQQKPGKAPKLLIYAASSLQSGVPSRFSGSGSGTDFTLTISSLQPEDFATYYCQQSYSTPFTFGQGTKLEIK

SEQ ID NO: 634 - protein, 107 aa, Artificial Sequence
  Description of Artificial Sequence: Synthetic polypeptide
  1A7[CD28]_L1.5
DIQMTQSPSSLSASVGDRVTITCRASQSISKYLNWYQQKPGKAPKLLIYAASSLQSGVPSRFSGSGSGTDFTLTISSLQPEDFATYYCQQSYSTPFTFGQGTKLEIK

SEQ ID NO: 635 - protein, 107 aa, Artificial Sequence
  Description of Artificial Sequence: Synthetic polypeptide
  1A7[CD28]_L1.6
DIQMTQSPSSLSASVGDRVTITCRASQSISNYLNWYQQKPGKAPKLLIYAASSLQSGVPSRFSGSGSGTDFTLTISSLQPEDFATYYCQQSYSTPFTFGQGTKLEIK

SEQ ID NO: 636 - protein, 107 aa, Artificial Sequence
  Description of Artificial Sequence: Synthetic polypeptide
  1A7[CD28]_L1.7
DIQMTQSPSSLSASVGDRVTITCRASQSISQYLNWYQQKPGKAPKLLIYAASSLQSGVPSRFSGSGSGTDFTLTISSLQPEDFATYYCQQSYSTPFTFGQGTKLEIK

SEQ ID NO: 637 - protein, 107 aa, Artificial Sequence
  Description of Artificial Sequence: Synthetic polypeptide
  1A7[CD28]_L1.8
DIQMTQSPSSLSASVGDRVTITCRASQSISTYLNWYQQKPGKAPKLLIYAASSLQSGVPSRFSGSGSGTDFTLTISSLQPEDFATYYCQQSYSTPFTFGQGTKLEIK

SEQ ID NO: 638 - protein, 107 aa, Artificial Sequence
  Description of Artificial Sequence: Synthetic polypeptide
  1A7[CD28]_L1.9
DIQMTQSPSSLSASVGDRVTITCRASQSISVYLNWYQQKPGKAPKLLIYAASSLQSGVPSRFSGSGSGTDFTLTISSLQPEDFATYYCQQSYSTPFTFGQGTKLEIK

SEQ ID NO: 639 - protein, 107 aa, Artificial Sequence
  Description of Artificial Sequence: Synthetic polypeptide
  1A7[CD28]_L1.10
DIQMTQSPSSLSASVGDRVTITCRASQSISYYLNWYQQKPGKAPKLLIYAASSLQSGVPSRFSGSGSGTDFTLTISSLQPEDFATYYCQQSYSTPFTFGQGTKLEIK

SEQ ID NO: 640 - protein, 107 aa, Artificial Sequence
  Description of Artificial Sequence: Synthetic polypeptide
  1A7[CD28]_L1.11
DIQMTQSPSSLSASVGDRVTITCRASQSISSALNWYQQKPGKAPKLLIYAASSLQSGVPSRFSGSGSGTDFTLTISSLQPEDFATYYCQQSYSTPFTFGQGTKLEIK

SEQ ID NO: 641 - protein, 107 aa, Artificial Sequence
  Description of Artificial Sequence: Synthetic polypeptide
  1A7[CD28]_L1.12
DIQMTQSPSSLSASVGDRVTITCRASQSISSDLNWYQQKPGKAPKLLIYAASSLQSGVPSRFSGSGSGTDFTLTISSLQPEDFATYYCQQSYSTPFTFGQGTKLEIK

SEQ ID NO: 642 - protein, 107 aa, Artificial Sequence
  Description of Artificial Sequence: Synthetic polypeptide
  1A7[CD28]_L1.13
DIQMTQSPSSLSASVGDRVTITCRASQSISSFLNWYQQKPGKAPKLLIYAASSLQSGVPSRFSGSGSGTDFTLTISSLQPEDFATYYCQQSYSTPFTFGQGTKLEIK

SEQ ID NO: 643 - protein, 107 aa, Artificial Sequence
  Description of Artificial Sequence: Synthetic polypeptide
  1A7[CD28]_L1.14
DIQMTQSPSSLSASVGDRVTITCRASQSISSHLNWYQQKPGKAPKLLIYAASSLQSGVPSRFSGSGSGTDFTLTISSLQPEDFATYYCQQSYSTPFTFGQGTKLEIK

SEQ ID NO: 644 - protein, 107 aa, Artificial Sequence
  Description of Artificial Sequence: Synthetic polypeptide
  1A7[CD28]_L1.15
DIQMTQSPSSLSASVGDRVTITCRASQSISSKLNWYQQKPGKAPKLLIYAASSLQSGVPSRFSGSGSGTDFTLTISSLQPEDFATYYCQQSYSTPFTFGQGTKLEIK

SEQ ID NO: 645 - protein, 107 aa, Artificial Sequence
  Description of Artificial Sequence: Synthetic polypeptide
  1A7[CD28]_L1.16
DIQMTQSPSSLSASVGDRVTITCRASQSISSLLNWYQQKPGKAPKLLIYAASSLQSGVPSRFSGSGSGTDFTLTISSLQPEDFATYYCQQSYSTPFTFGQGTKLEIK

SEQ ID NO: 646 - protein, 107 aa, Artificial Sequence
  Description of Artificial Sequence: Synthetic polypeptide
  1A7[CD28]_L1.17
DIQMTQSPSSLSASVGDRVTITCRASQSISSNLNWYQQKPGKAPKLLIYAASSLQSGVPSRFSGSGSGTDFTLTISSLQPEDFATYYCQQSYSTPFTFGQGTKLEIK

SEQ ID NO: 647 - protein, 107 aa, Artificial Sequence
  Description of Artificial Sequence: Synthetic polypeptide
  1A7[CD28]_L1.18
DIQMTQSPSSLSASVGDRVTITCRASQSISSQLNWYQQKPGKAPKLLIYAASSLQSGVPSRFSGSGSGTDFTLTISSLQPEDFATYYCQQSYSTPFTFGQGTKLEIK

SEQ ID NO: 648 - protein, 107 aa, Artificial Sequence
  Description of Artificial Sequence: Synthetic polypeptide
  1A7[CD28]_L1.19
DIQMTQSPSSLSASVGDRVTITCRASQSISSSLNWYQQKPGKAPKLLIYAASSLQSGVPSRFSGSGSGTDFTLTISSLQPEDFATYYCQQSYSTPFTFGQGTKLEIK

SEQ ID NO: 649 - protein, 107 aa, Artificial Sequence
  Description of Artificial Sequence: Synthetic polypeptide
  1A7[CD28]_L1.20
DIQMTQSPSSLSASVGDRVTITCRASQSISSWLNWYQQKPGKAPKLLIYAASSLQSGVPSRFSGSGSGTDFTLTISSLQPEDFATYYCQQSYSTPFTFGQGTKLEIK

SEQ ID NO: 650 - protein, 107 aa, Artificial Sequence
  Description of Artificial Sequence: Synthetic polypeptide
  1A7[CD28]_L1.21
DIQMTQSPSSLSASVGDRVTITCRASQSISSYLAWYQQKPGKAPKLLIYAASSLQSGVPSRFSGSGSGTDFTLTISSLQPEDFATYYCQQSYSTPFTFGQGTKLEIK

SEQ ID NO: 651 - protein, 107 aa, Artificial Sequence
  Description of Artificial Sequence: Synthetic polypeptide
  1A7[CD28]_L1.22
DIQMTQSPSSLSASVGDRVTITCRASQSISSYLDWYQQKPGKAPKLLIYAASSLQSGVPSRFSGSGSGTDFTLTISSLQPEDFATYYCQQSYSTPFTFGQGTKLEIK

SEQ ID NO: 652 - protein, 107 aa, Artificial Sequence
  Description of Artificial Sequence: Synthetic polypeptide
  1A7[CD28]_L1.23
DIQMTQSPSSLSASVGDRVTITCRASQSISSYLGWYQQKPGKAPKLLIYAASSLQSGVPSRFSGSGSGTDFTLTISSLQPEDFATYYCQQSYSTPFTFGQGTKLEIK

SEQ ID NO: 653 - protein, 107 aa, Artificial Sequence
  Description of Artificial Sequence: Synthetic polypeptide
  1A7[CD28]_L1.24
DIQMTQSPSSLSASVGDRVTITCRASQSISSYLHWYQQKPGKAPKLLIYAASSLQSGVPSRFSGSGSGTDFTLTISSLQPEDFATYYCQQSYSTPFTFGQGTKLEIK

SEQ ID NO: 654 - protein, 107 aa, Artificial Sequence
  Description of Artificial Sequence: Synthetic polypeptide
  1A7[CD28]_L1.25
DIQMTQSPSSLSASVGDRVTITCRASQSISSYLQWYQQKPGKAPKLLIYAASSLQSGVPSRFSGSGSGTDFTLTISSLQPEDFATYYCQQSYSTPFTFGQGTKLEIK

SEQ ID NO: 655 - protein, 107 aa, Artificial Sequence
  Description of Artificial Sequence: Synthetic polypeptide
  1A7[CD28]_L1.26
DIQMTQSPSSLSASVGDRVTITCRASQSISSYLSWYQQKPGKAPKLLIYAASSLQSGVPSRFSGSGSGTDFTLTISSLQPEDFATYYCQQSYSTPFTFGQGTKLEIK

SEQ ID NO: 656 - protein, 107 aa, Artificial Sequence
  Description of Artificial Sequence: Synthetic polypeptide
  1A7[CD28]_L1.27
DIQMTQSPSSLSASVGDRVTITCRASQSISSYLTWYQQKPGKAPKLLIYAASSLQSGVPSRFSGSGSGTDFTLTISSLQPEDFATYYCQQSYSTPFTFGQGTKLEIK

SEQ ID NO: 657 - protein, 107 aa, Artificial Sequence
  Description of Artificial Sequence: Synthetic polypeptide
  1A7[CD28]_L1.28
DIQMTQSPSSLSASVGDRVTITCRASQSISSYLYWYQQKPGKAPKLLIYAASSLQSGVPSRFSGSGSGTDFTLTISSLQPEDFATYYCQQSYSTPFTFGQGTKLEIK

SEQ ID NO: 658 - protein, 107 aa, Artificial Sequence
  Description of Artificial Sequence: Synthetic polypeptide
  1A7[CD28]_L1.29
DIQMTQSPSSLSASVGDRVTITCRASQSISSYLNWYQQKPGKAPKLLIYDASSLQSGVPSRFSGSGSGTDFTLTISSLQPEDFATYYCQQSYSTPFTFGQGTKLEIK

SEQ ID NO: 659 - protein, 107 aa, Artificial Sequence
  Description of Artificial Sequence: Synthetic polypeptide
  1A7[CD28]_L1.30
DIQMTQSPSSLSASVGDRVTITCRASQSISSYLNWYQQKPGKAPKLLIYGASSLQSGVPSRFSGSGSGTDFTLTISSLQPEDFATYYCQQSYSTPFTFGQGTKLEIK

SEQ ID NO: 660 - protein, 107 aa, Artificial Sequence
  Description of Artificial Sequence: Synthetic polypeptide
  1A7[CD28]_L1.31
DIQMTQSPSSLSASVGDRVTITCRASQSISSYLNWYQQKPGKAPKLLIYKASSLQSGVPSRFSGSGSGTDFTLTISSLQPEDFATYYCQQSYSTPFTFGQGTKLEIK

SEQ ID NO: 661 - protein, 107 aa, Artificial Sequence
  Description of Artificial Sequence: Synthetic polypeptide
  1A7[CD28]_L1.32
DIQMTQSPSSLSASVGDRVTITCRASQSISSYLNWYQQKPGKAPKLLIYLASSLQSGVPSRFSGSGSGTDFTLTISSLQPEDFATYYCQQSYSTPFTFGQGTKLEIK

SEQ ID NO: 662 - protein, 107 aa, Artificial Sequence
  Description of Artificial Sequence: Synthetic polypeptide
  1A7[CD28]_L1.33
DIQMTQSPSSLSASVGDRVTITCRASQSISSYLNWYQQKPGKAPKLLIYQASSLQSGVPSRFSGSGSGTDFTLTISSLQPEDFATYYCQQSYSTPFTFGQGTKLEIK

SEQ ID NO: 663 - protein, 107 aa, Artificial Sequence
  Description of Artificial Sequence: Synthetic polypeptide
  1A7[CD28]_L1.34
DIQMTQSPSSLSASVGDRVTITCRASQSISSYLNWYQQKPGKAPKLLIYSASSLQSGVPSRFSGSGSGTDFTLTISSLQPEDFATYYCQQSYSTPFTFGQGTKLEIK

SEQ ID NO: 664 - protein, 107 aa, Artificial Sequence
  Description of Artificial Sequence: Synthetic polypeptide
  1A7[CD28]_L1.35
DIQMTQSPSSLSASVGDRVTITCRASQSISSYLNWYQQKPGKAPKLLIYTASSLQSGVPSRFSGSGSGTDFTLTISSLQPEDFATYYCQQSYSTPFTFGQGTKLEIK

SEQ ID NO: 665 - protein, 107 aa, Artificial Sequence
  Description of Artificial Sequence: Synthetic polypeptide
  1A7[CD28]_L1.36
DIQMTQSPSSLSASVGDRVTITCRASQSISSYLNWYQQKPGKAPKLLIYWASSLQSGVPSRFSGSGSGTDFTLTISSLQPEDFATYYCQQSYSTPFTFGQGTKLEIK

SEQ ID NO: 666 - protein, 107 aa, Artificial Sequence
  Description of Artificial Sequence: Synthetic polypeptide
  1A7[CD28]_L1.37
DIQMTQSPSSLSASVGDRVTITCRASQSISSYLNWYQQKPGKAPKLLIYYASSLQSGVPSRFSGSGSGTDFTLTISSLQPEDFATYYCQQSYSTPFTFGQGTKLEIK

SEQ ID NO: 667 - protein, 107 aa, Artificial Sequence
  Description of Artificial Sequence: Synthetic polypeptide
  1A7[CD28]_L1.38
DIQMTQSPSSLSASVGDRVTITCRASQSISSYLNWYQQKPGKAPKLLIYAASALQSGVPSRFSGSGSGTDFTLTISSLQPEDFATYYCQQSYSTPFTFGQGTKLEIK

SEQ ID NO: 668 - protein, 107 aa, Artificial Sequence
  Description of Artificial Sequence: Synthetic polypeptide
  1A7[CD28]_L1.39
DIQMTQSPSSLSASVGDRVTITCRASQSISSYLNWYQQKPGKAPKLLIYAASDLQSGVPSRFSGSGSGTDFTLTISSLQPEDFATYYCQQSYSTPFTFGQGTKLEIK

SEQ ID NO: 669 - protein, 107 aa, Artificial Sequence
  Description of Artificial Sequence: Synthetic polypeptide
  1A7[CD28]_L1.40
DIQMTQSPSSLSASVGDRVTITCRASQSISSYLNWYQQKPGKAPKLLIYAASKLQSGVPSRFSGSGSGTDFTLTISSLQPEDFATYYCQQSYSTPFTFGQGTKLEIK

SEQ ID NO: 670 - protein, 107 aa, Artificial Sequence
  Description of Artificial Sequence: Synthetic polypeptide
  1A7[CD28]_L1.41
DIQMTQSPSSLSASVGDRVTITCRASQSISSYLNWYQQKPGKAPKLLIYAASNLQSGVPSRFSGSGSGTDFTLTISSLQPEDFATYYCQQSYSTPFTFGQGTKLEIK

SEQ ID NO: 671 - protein, 107 aa, Artificial Sequence
  Description of Artificial Sequence: Synthetic polypeptide
  1A7[CD28]_L1.42
DIQMTQSPSSLSASVGDRVTITCRASQSISSYLNWYQQKPGKAPKLLIYAASQLQSGVPSRFSGSGSGTDFTLTISSLQPEDFATYYCQQSYSTPFTFGQGTKLEIK

SEQ ID NO: 672 - protein, 107 aa, Artificial Sequence
  Description of Artificial Sequence: Synthetic polypeptide
  1A7[CD28]_L1.43
DIQMTQSPSSLSASVGDRVTITCRASQSISSYLNWYQQKPGKAPKLLIYAASTLQSGVPSRFSGSGSGTDFTLTISSLQPEDFATYYCQQSYSTPFTFGQGTKLEIK

SEQ ID NO: 673 - protein, 107 aa, Artificial Sequence
  Description of Artificial Sequence: Synthetic polypeptide
  1A7[CD28]_L1.44
DIQMTQSPSSLSASVGDRVTITCRASQSISSYLNWYQQKPGKAPKLLIYAASYLQSGVPSRFSGSGSGTDFTLTISSLQPEDFATYYCQQSYSTPFTFGQGTKLEIK

SEQ ID NO: 674 - protein, 107 aa, Artificial Sequence
  Description of Artificial Sequence: Synthetic polypeptide
  1A7[CD28]_L1.45
DIQMTQSPSSLSASVGDRVTITCRASQSISSYLNWYQQKPGKAPKLLIYAASSLASGVPSRFSGSGSGTDFTLTISSLQPEDFATYYCQQSYSTPFTFGQGTKLEIK

SEQ ID NO: 675 - protein, 107 aa, Artificial Sequence
  Description of Artificial Sequence: Synthetic polypeptide
  1A7[CD28]_L1.46
DIQMTQSPSSLSASVGDRVTITCRASQSISSYLNWYQQKPGKAPKLLIYAASSLESGVPSRFSGSGSGTDFTLTISSLQPEDFATYYCQQSYSTPFTFGQGTKLEIK

SEQ ID NO: 676 - protein, 107 aa, Artificial Sequence
  Description of Artificial Sequence: Synthetic polypeptide
  1A7[CD28]_L1.47
DIQMTQSPSSLSASVGDRVTITCRASQSISSYLNWYQQKPGKAPKLLIYAASSLFSGVPSRFSGSGSGTDFTLTISSLQPEDFATYYCQQSYSTPFTFGQGTKLEIK

SEQ ID NO: 677 - protein, 107 aa, Artificial Sequence
  Description of Artificial Sequence: Synthetic polypeptide
  1A7[CD28]_L1.48
DIQMTQSPSSLSASVGDRVTITCRASQSISSYLNWYQQKPGKAPKLLIYAASSLHSGVPSRFSGSGSGTDFTLTISSLQPEDFATYYCQQSYSTPFTFGQGTKLEIK

SEQ ID NO: 678 - protein, 107 aa, Artificial Sequence
  Description of Artificial Sequence: Synthetic polypeptide
  1A7[CD28]_L1.49
DIQMTQSPSSLSASVGDRVTITCRASQSISSYLNWYQQKPGKAPKLLIYAASSLISGVPSRFSGSGSGTDFTLTISSLQPEDFATYYCQQSYSTPFTFGQGTKLEIK

SEQ ID NO: 679 - protein, 107 aa, Artificial Sequence
  Description of Artificial Sequence: Synthetic polypeptide
  1A7[CD28]_L1.50
DIQMTQSPSSLSASVGDRVTITCRASQSISSYLNWYQQKPGKAPKLLIYAASSLKSGVPSRFSGSGSGTDFTLTISSLQPEDFATYYCQQSYSTPFTFGQGTKLEIK

SEQ ID NO: 680 - protein, 107 aa, Artificial Sequence
  Description of Artificial Sequence: Synthetic polypeptide
  1A7[CD28]_L1.51
DIQMTQSPSSLSASVGDRVTITCRASQSISSYLNWYQQKPGKAPKLLIYAASSLNSGVPSRFSGSGSGTDFTLTISSLQPEDFATYYCQQSYSTPFTFGQGTKLEIK

SEQ ID NO: 681 - protein, 107 aa, Artificial Sequence
  Description of Artificial Sequence: Synthetic polypeptide
  1A7[CD28]_L1.52
DIQMTQSPSSLSASVGDRVTITCRASQSISSYLNWYQQKPGKAPKLLIYAASSLSSGVPSRFSGSGSGTDFTLTISSLQPEDFATYYCQQSYSTPFTFGQGTKLEIK

SEQ ID NO: 682 - protein, 107 aa, Artificial Sequence
  Description of Artificial Sequence: Synthetic polypeptide
  1A7[CD28]_L1.53
DIQMTQSPSSLSASVGDRVTITCRASQSISSYLNWYQQKPGKAPKLLIYAASSLVSGVPSRFSGSGSGTDFTLTISSLQPEDFATYYCQQSYSTPFTFGQGTKLEIK

SEQ ID NO: 683 - protein, 107 aa, Artificial Sequence
  Description of Artificial Sequence: Synthetic polypeptide
  1A7[CD28]_L1.54
DIQMTQSPSSLSASVGDRVTITCRASQSISSYLNWYQQKPGKAPKLLIYAASSLYSGVPSRFSGSGSGTDFTLTISSLQPEDFATYYCQQSYSTPFTFGQGTKLEIK

SEQ ID NO: 684 - protein, 107 aa, Artificial Sequence
  Description of Artificial Sequence: Synthetic polypeptide
  1A7[CD28]_L1.55
DIQMTQSPSSLSASVGDRVTITCRASQSISSYLNWYQQKPGKAPKLLIYAASSLQAGVPSRFSGSGSGTDFTLTISSLQPEDFATYYCQQSYSTPFTFGQGTKLEIK

SEQ ID NO: 685 - protein, 107 aa, Artificial Sequence
  Description of Artificial Sequence: Synthetic polypeptide
  1A7[CD28]_L1.56
DIQMTQSPSSLSASVGDRVTITCRASQSISSYLNWYQQKPGKAPKLLIYAASSLQDGVPSRFSGSGSGTDFTLTISSLQPEDFATYYCQQSYSTPFTFGQGTKLEIK

SEQ ID NO: 686 - protein, 107 aa, Artificial Sequence
  Description of Artificial Sequence: Synthetic polypeptide
  1A7[CD28]_L1.57
DIQMTQSPSSLSASVGDRVTITCRASQSISSYLNWYQQKPGKAPKLLIYAASSLQGGVPSRFSGSGSGTDFTLTISSLQPEDFATYYCQQSYSTPFTFGQGTKLEIK

SEQ ID NO: 687 - protein, 107 aa, Artificial Sequence
  Description of Artificial Sequence: Synthetic polypeptide
  1A7[CD28]_L1.58
DIQMTQSPSSLSASVGDRVTITCRASQSISSYLNWYQQKPGKAPKLLIYAASSLQHGVPSRFSGSGSGTDFTLTISSLQPEDFATYYCQQSYSTPFTFGQGTKLEIK

SEQ ID NO: 688 - protein, 107 aa, Artificial Sequence
  Description of Artificial Sequence: Synthetic polypeptide
  1A7[CD28]_L1.59
DIQMTQSPSSLSASVGDRVTITCRASQSISSYLNWYQQKPGKAPKLLIYAASSLQKGVPSRFSGSGSGTDFTLTISSLQPEDFATYYCQQSYSTPFTFGQGTKLEIK

SEQ ID NO: 689 - protein, 107 aa, Artificial Sequence
  Description of Artificial Sequence: Synthetic polypeptide
  1A7[CD28]_L1.60
DIQMTQSPSSLSASVGDRVTITCRASQSISSYLNWYQQKPGKAPKLLIYAASSLQQGVPSRFSGSGSGTDFTLTISSLQPEDFATYYCQQSYSTPFTFGQGTKLEIK

SEQ ID NO: 690 - protein, 107 aa, Artificial Sequence
  Description of Artificial Sequence: Synthetic polypeptide
  1A7[CD28]_L1.61
DIQMTQSPSSLSASVGDRVTITCRASQSISSYLNWYQQKPGKAPKLLIYAASSLQTGVPSRFSGSGSGTDFTLTISSLQPEDFATYYCQQSYSTPFTFGQGTKLEIK

SEQ ID NO: 691 - protein, 107 aa, Artificial Sequence
  Description of Artificial Sequence: Synthetic polypeptide
  1A7[CD28]_L1.62
DIQMTQSPSSLSASVGDRVTITCRASQSISSYLNWYQQKPGKAPKLLIYAASSLQVGVPSRFSGSGSGTDFTLTISSLQPEDFATYYCQQSYSTPFTFGQGTKLEIK

SEQ ID NO: 692 - protein, 107 aa, Artificial Sequence
  Description of Artificial Sequence: Synthetic polypeptide
  1A7[CD28]_L1.63
DIQMTQSPSSLSASVGDRVTITCRASQSISSYLNWYQQKPGKAPKLLIYAASSLQYGVPSRFSGSGSGTDFTLTISSLQPEDFATYYCQQSYSTPFTFGQGTKLEIK

SEQ ID NO: 693 - protein, 107 aa, Artificial Sequence
  Description of Artificial Sequence: Synthetic polypeptide
  1A7[CD28]_L1.64
DIQMTQSPSSLSASVGDRVTITCRASQSISSYLNWYQQKPGKAPKLLIYAASSLQSGVPSRFSGSGSGTDFTLTISSLQPEDFATYYCQQAYSTPFTFGQGTKLEIK

SEQ ID NO: 694 - protein, 107 aa, Artificial Sequence
  Description of Artificial Sequence: Synthetic polypeptide
  1A7[CD28]_L1.65
DIQMTQSPSSLSASVGDRVTITCRASQSISSYLNWYQQKPGKAPKLLIYAASSLQSGVPSRFSGSGSGTDFTLTISSLQPEDFATYYCQQDYSTPFTFGQGTKLEIK

SEQ ID NO: 695 - protein, 107 aa, Artificial Sequence
  Description of Artificial Sequence: Synthetic polypeptide
  1A7[CD28]_L1.66
DIQMTQSPSSLSASVGDRVTITCRASQSISSYLNWYQQKPGKAPKLLIYAASSLQSGVPSRFSGSGSGTDFTLTISSLQPEDFATYYCQQFYSTPFTFGQGTKLEIK

SEQ ID NO: 696 - protein, 107 aa, Artificial Sequence
  Description of Artificial Sequence: Synthetic polypeptide
  1A7[CD28]_L1.67
DIQMTQSPSSLSASVGDRVTITCRASQSISSYLNWYQQKPGKAPKLLIYAASSLQSGVPSRFSGSGSGTDFTLTISSLQPEDFATYYCQQHYSTPFTFGQGTKLEIK

SEQ ID NO: 697 - protein, 107 aa, Artificial Sequence
  Description of Artificial Sequence: Synthetic polypeptide
  1A7[CD28]_L1.68
DIQMTQSPSSLSASVGDRVTITCRASQSISSYLNWYQQKPGKAPKLLIYAASSLQSGVPSRFSGSGSGTDFTLTISSLQPEDFATYYCQQKYSTPFTFGQGTKLEIK

SEQ ID NO: 698 - protein, 107 aa, Artificial Sequence
  Description of Artificial Sequence: Synthetic polypeptide
  1A7[CD28]_L1.69
DIQMTQSPSSLSASVGDRVTITCRASQSISSYLNWYQQKPGKAPKLLIYAASSLQSGVPSRFSGSGSGTDFTLTISSLQPEDFATYYCQQLYSTPFTFGQGTKLEIK

SEQ ID NO: 699 - protein, 107 aa, Artificial Sequence
  Description of Artificial Sequence: Synthetic polypeptide
  1A7[CD28]_L1.70
DIQMTQSPSSLSASVGDRVTITCRASQSISSYLNWYQQKPGKAPKLLIYAASSLQSGVPSRFSGSGSGTDFTLTISSLQPEDFATYYCQQTYSTPFTFGQGTKLEIK

SEQ ID NO: 700 - protein, 107 aa, Artificial Sequence
  Description of Artificial Sequence: Synthetic polypeptide
  1A7[CD28]_L1.71
DIQMTQSPSSLSASVGDRVTITCRASQSISSYLNWYQQKPGKAPKLLIYAASSLQSGVPSRFSGSGSGTDFTLTISSLQPEDFATYYCQQVYSTPFTFGQGTKLEIK

SEQ ID NO: 701 - protein, 107 aa, Artificial Sequence
  Description of Artificial Sequence: Synthetic polypeptide
  1A7[CD28]_L1.72
DIQMTQSPSSLSASVGDRVTITCRASQSISSYLNWYQQKPGKAPKLLIYAASSLQSGVPSRFSGSGSGTDFTLTISSLQPEDFATYYCQQYYSTPFTFGQGTKLEIK

SEQ ID NO: 702 - protein, 107 aa, Artificial Sequence
  Description of Artificial Sequence: Synthetic polypeptide
  1A7[CD28]_L1.73
DIQMTQSPSSLSASVGDRVTITCRASQSISSYLNWYQQKPGKAPKLLIYAASSLQSGVPSRFSGSGSGTDFTLTISSLQPEDFATYYCQQSASTPFTFGQGTKLEIK

SEQ ID NO: 703 - protein, 107 aa, Artificial Sequence
  Description of Artificial Sequence: Synthetic polypeptide
  1A7[CD28]_L1.74
DIQMTQSPSSLSASVGDRVTITCRASQSISSYLNWYQQKPGKAPKLLIYAASSLQSGVPSRFSGSGSGTDFTLTISSLQPEDFATYYCQQSDSTPFTFGQGTKLEIK

SEQ ID NO: 704 - protein, 107 aa, Artificial Sequence
  Description of Artificial Sequence: Synthetic polypeptide
  1A7[CD28]_L1.75
DIQMTQSPSSLSASVGDRVTITCRASQSISSYLNWYQQKPGKAPKLLIYAASSLQSGVPSRFSGSGSGTDFTLTISSLQPEDFATYYCQQSFSTPFTFGQGTKLEIK

SEQ ID NO: 705 - protein, 107 aa, Artificial Sequence
  Description of Artificial Sequence: Synthetic polypeptide
  1A7[CD28]_L1.76
DIQMTQSPSSLSASVGDRVTITCRASQSISSYLNWYQQKPGKAPKLLIYAASSLQSGVPSRFSGSGSGTDFTLTISSLQPEDFATYYCQQSHSTPFTFGQGTKLEIK

SEQ ID NO: 706 - protein, 107 aa, Artificial Sequence
  Description of Artificial Sequence: Synthetic polypeptide
  1A7[CD28]_L1.77
DIQMTQSPSSLSASVGDRVTITCRASQSISSYLNWYQQKPGKAPKLLIYAASSLQSGVPSRFSGSGSGTDFTLTISSLQPEDFATYYCQQSKSTPFTFGQGTKLEIK

SEQ ID NO: 707 - protein, 107 aa, Artificial Sequence
  Description of Artificial Sequence: Synthetic polypeptide
  1A7[CD28]_L1.78
DIQMTQSPSSLSASVGDRVTITCRASQSISSYLNWYQQKPGKAPKLLIYAASSLQSGVPSRFSGSGSGTDFTLTISSLQPEDFATYYCQQSLSTPFTFGQGTKLEIK

SEQ ID NO: 708 - protein, 107 aa, Artificial Sequence
  Description of Artificial Sequence: Synthetic polypeptide
  1A7[CD28]_L1.79
DIQMTQSPSSLSASVGDRVTITCRASQSISSYLNWYQQKPGKAPKLLIYAASSLQSGVPSRFSGSGSGTDFTLTISSLQPEDFATYYCQQSQSTPFTFGQGTKLEIK

SEQ ID NO: 709 - protein, 107 aa, Artificial Sequence
  Description of Artificial Sequence: Synthetic polypeptide
  1A7[CD28]_L1.80
DIQMTQSPSSLSASVGDRVTITCRASQSISSYLNWYQQKPGKAPKLLIYAASSLQSGVPSRFSGSGSGTDFTLTISSLQPEDFATYYCQQSVSTPFTFGQGTKLEIK

SEQ ID NO: 710 - protein, 107 aa, Artificial Sequence
  Description of Artificial Sequence: Synthetic polypeptide
  1A7[CD28]_L1.81
DIQMTQSPSSLSASVGDRVTITCRASQSISSYLNWYQQKPGKAPKLLIYAASSLQSGVPSRFSGSGSGTDFTLTISSLQPEDFATYYCQQSWSTPFTFGQGTKLEIK

SEQ ID NO: 711 - protein, 107 aa, Artificial Sequence
  Description of Artificial Sequence: Synthetic polypeptide
  1A7[CD28]_L1.82
DIQMTQSPSSLSASVGDRVTITCRASQSISSYLNWYQQKPGKAPKLLIYAASSLQSGVPSRFSGSGSGTDFTLTISSLQPEDFATYYCQQSYATPFTFGQGTKLEIK

SEQ ID NO: 712 - protein, 107 aa, Artificial Sequence
  Description of Artificial Sequence: Synthetic polypeptide
  1A7[CD28]_L1.83
DIQMTQSPSSLSASVGDRVTITCRASQSISSYLNWYQQKPGKAPKLLIYAASSLQSGVPSRFSGSGSGTDFTLTISSLQPEDFATYYCQQSYDTPFTFGQGTKLEIK

SEQ ID NO: 713 - protein, 107 aa, Artificial Sequence
  Description of Artificial Sequence: Synthetic polypeptide
  1A7[CD28]_L1.84
DIQMTQSPSSLSASVGDRVTITCRASQSISSYLNWYQQKPGKAPKLLIYAASSLQSGVPSRFSGSGSGTDFTLTISSLQPEDFATYYCQQSYGTPFTFGQGTKLEIK

SEQ ID NO: 714 - protein, 107 aa, Artificial Sequence
  Description of Artificial Sequence: Synthetic polypeptide
  1A7[CD28]_L1.85
DIQMTQSPSSLSASVGDRVTITCRASQSISSYLNWYQQKPGKAPKLLIYAASSLQSGVPSRFSGSGSGTDFTLTISSLQPEDFATYYCQQSYHTPFTFGQGTKLEIK

SEQ ID NO: 715 - protein, 107 aa, Artificial Sequence
  Description of Artificial Sequence: Synthetic polypeptide
  1A7[CD28]_L1.86
DIQMTQSPSSLSASVGDRVTITCRASQSISSYLNWYQQKPGKAPKLLIYAASSLQSGVPSRFSGSGSGTDFTLTISSLQPEDFATYYCQQSYKTPFTFGQGTKLEIK

SEQ ID NO: 716 - protein, 107 aa, Artificial Sequence
  Description of Artificial Sequence: Synthetic polypeptide
  1A7[CD28]_L1.87
DIQMTQSPSSLSASVGDRVTITCRASQSISSYLNWYQQKPGKAPKLLIYAASSLQSGVPSRFSGSGSGTDFTLTISSLQPEDFATYYCQQSYNTPFTFGQGTKLEIK

SEQ ID NO: 717 - protein, 107 aa, Artificial Sequence
  Description of Artificial Sequence: Synthetic polypeptide
  1A7[CD28]_L1.88
DIQMTQSPSSLSASVGDRVTITCRASQSISSYLNWYQQKPGKAPKLLIYAASSLQSGVPSRFSGSGSGTDFTLTISSLQPEDFATYYCQQSYQTPFTFGQGTKLEIK

SEQ ID NO: 718 - protein, 107 aa, Artificial Sequence
  Description of Artificial Sequence: Synthetic polypeptide
  1A7[CD28]_L1.89
DIQMTQSPSSLSASVGDRVTITCRASQSISSYLNWYQQKPGKAPKLLIYAASSLQSGVPSRFSGSGSGTDFTLTISSLQPEDFATYYCQQSYTTPFTFGQGTKLEIK

SEQ ID NO: 719 - protein, 107 aa, Artificial Sequence
  Description of Artificial Sequence: Synthetic polypeptide
  1A7[CD28]_L1.90
DIQMTQSPSSLSASVGDRVTITCRASQSISSYLNWYQQKPGKAPKLLIYAASSLQSGVPSRFSGSGSGTDFTLTISSLQPEDFATYYCQQSYVTPFTFGQGTKLEIK

SEQ ID NO: 720 - protein, 107 aa, Artificial Sequence
  Description of Artificial Sequence: Synthetic polypeptide
  1A7[CD28]_L1.91
DIQMTQSPSSLSASVGDRVTITCRASQSISSYLNWYQQKPGKAPKLLIYAASSLQSGVPSRFSGSGSGTDFTLTISSLQPEDFATYYCQQSYYTPFTFGQGTKLEIK

SEQ ID NO: 721 - protein, 107 aa, Artificial Sequence
  Description of Artificial Sequence: Synthetic polypeptide
  1A7[CD28]_L1.92
DIQMTQSPSSLSASVGDRVTITCRASQSISSYLNWYQQKPGKAPKLLIYAASSLQSGVPSRFSGSGSGTDFTLTISSLQPEDFATYYCQQSYSAPFTFGQGTKLEIK

SEQ ID NO: 722 - protein, 107 aa, Artificial Sequence
  Description of Artificial Sequence: Synthetic polypeptide
  1A7[CD28]_L1.93
DIQMTQSPSSLSASVGDRVTITCRASQSISSYLNWYQQKPGKAPKLLIYAASSLQSGVPSRFSGSGSGTDFTLTISSLQPEDFATYYCQQSYSDPFTFGQGTKLEIK

SEQ ID NO: 723 - protein, 107 aa, Artificial Sequence
  Description of Artificial Sequence: Synthetic polypeptide
  1A7[CD28]_L1.94
DIQMTQSPSSLSASVGDRVTITCRASQSISSYLNWYQQKPGKAPKLLIYAASSLQSGVPSRFSGSGSGTDFTLTISSLQPEDFATYYCQQSYSFPFTFGQGTKLEIK

SEQ ID NO: 724 - protein, 107 aa, Artificial Sequence
  Description of Artificial Sequence: Synthetic polypeptide
  1A7[CD28]_L1.95
DIQMTQSPSSLSASVGDRVTITCRASQSISSYLNWYQQKPGKAPKLLIYAASSLQSGVPSRFSGSGSGTDFTLTISSLQPEDFATYYCQQSYSIPFTFGQGTKLEIK

SEQ ID NO: 725 - protein, 107 aa, Artificial Sequence
  Description of Artificial Sequence: Synthetic polypeptide
  1A7[CD28]_L1.96
DIQMTQSPSSLSASVGDRVTITCRASQSISSYLNWYQQKPGKAPKLLIYAASSLQSGVPSRFSGSGSGTDFTLTISSLQPEDFATYYCQQSYSKPFTFGQGTKLEIK

SEQ ID NO: 726 - protein, 107 aa, Artificial Sequence
  Description of Artificial Sequence: Synthetic polypeptide
  1A7[CD28]_L1.97
DIQMTQSPSSLSASVGDRVTITCRASQSISSYLNWYQQKPGKAPKLLIYAASSLQSGVPSRFSGSGSGTDFTLTISSLQPEDFATYYCQQSYSLPFTFGQGTKLEIK

SEQ ID NO: 727 - protein, 107 aa, Artificial Sequence
  Description of Artificial Sequence: Synthetic polypeptide
  1A7[CD28]_L1.98
DIQMTQSPSSLSASVGDRVTITCRASQSISSYLNWYQQKPGKAPKLLIYAASSLQSGVPSRFSGSGSGTDFTLTISSLQPEDFATYYCQQSYSQPFTFGQGTKLEIK

SEQ ID NO: 728 - protein, 107 aa, Artificial Sequence
  Description of Artificial Sequence: Synthetic polypeptide
  1A7[CD28]_L1.99
DIQMTQSPSSLSASVGDRVTITCRASQSISSYLNWYQQKPGKAPKLLIYAASSLQSGVPSRFSGSGSGTDFTLTISSLQPEDFATYYCQQSYSSPFTFGQGTKLEIK

SEQ ID NO: 729 - protein, 107 aa, Artificial Sequence
  Description of Artificial Sequence: Synthetic polypeptide
  1A7[CD28]_L1.100
DIQMTQSPSSLSASVGDRVTITCRASQSISSYLNWYQQKPGKAPKLLIYAASSLQSGVPSRFSGSGSGTDFTLTISSLQPEDFATYYCQQSYSVPFTFGQGTKLEIK

SEQ ID NO: 730 - protein, 107 aa, Artificial Sequence
  Description of Artificial Sequence: Synthetic polypeptide
  1A7[CD28]_L1.101
DIQMTQSPSSLSASVGDRVTITCRASQSISSYLNWYQQKPGKAPKLLIYAASSLQSGVPSRFSGSGSGTDFTLTISSLQPEDFATYYCQQSYSYPFTFGQGTKLEIK

SEQ ID NO: 731 - protein, 107 aa, Artificial Sequence
  Description of Artificial Sequence: Synthetic polypeptide
  1A7[CD28]_L1.102
DIQMTQSPSSLSASVGDRVTITCRASQSISSYLNWYQQKPGKAPKLLIYAASSLQSGVPSRFSGSGSGTDFTLTISSLQPEDFATYYCQQSYSTPITFGQGTKLEIK

SEQ ID NO: 732 - protein, 107 aa, Artificial Sequence
  Description of Artificial Sequence: Synthetic polypeptide
  1A7[CD28]_L1.103
DIQMTQSPSSLSASVGDRVTITCRASQSISSYLNWYQQKPGKAPKLLIYAASSLQSGVPSRFSGSGSGTDFTLTISSLQPEDFATYYCQQSYSTPLTFGQGTKLEIK

SEQ ID NO: 733 - protein, 107 aa, Artificial Sequence
  Description of Artificial Sequence: Synthetic polypeptide
  1A7[CD28]_L1.104
DIQMTQSPSSLSASVGDRVTITCRASQSISSYLNWYQQKPGKAPKLLIYAASSLQSGVPSRFSGSGSGTDFTLTISSLQPEDFATYYCQQSYSTPWTFGQGTKLEIK

SEQ ID NO: 734 - protein, 107 aa, Artificial Sequence
  Description of Artificial Sequence: Synthetic polypeptide
  1A7[CD28]_L1.105
DIQMTQSPSSLSASVGDRVTITCRASQSISSYLTWYQQKPGKAPKLLIYAASSLQSGVPSRFSGSGSGTDFTLTISSLQPEDFATYYCQQVYSTPFTFGQGTKLEIK

SEQ ID NO: 735 - protein, 107 aa, Artificial Sequence
  Description of Artificial Sequence: Synthetic polypeptide
  1A7[CD28]_L1.106
DIQMTQSPSSLSASVGDRVTITCRASQSISSYLTWYQQKPGKAPKLLIYAASSLQSGVPSRFSGSGSGTDFTLTISSLQPEDFATYYCQQSYNTPFTFGQGTKLEIK

SEQ ID NO: 736 - protein, 118 aa, Artificial Sequence
  Description of Artificial Sequence: Synthetic polypeptide
  2G4[PD-L1]_H1.1
EVQLLESGGGLVQPGGSLRLSCAASGFTFPSRDMSWVRQAPGKRLEWVSTISSGGSFTHYPDSVKGRFTISRDNSKNTLYLQMNSLRAEDTAVYYCVRRSGDWYFDVWGAGTTVTVSS

SEQ ID NO: 737 - protein, 118 aa, Artificial Sequence
  Description of Artificial Sequence: Synthetic polypeptide
  2G4[PD-L1]_H1.2
EVQLLESGGGLVQPGGSLRLSCAASGFTFSQKDMSWVRQAPGKRLEWVSTISSGGSFTHYPDSVKGRFTISRDNSKNTLYLQMNSLRAEDTAVYYCVRRSGDWYFDVWGAGTTVTVSS

SEQ ID NO: 738 - protein, 118 aa, Artificial Sequence
  Description of Artificial Sequence: Synthetic polypeptide
  2G4[PD-L1]_H1.3
EVQLLESGGGLVQPGGSLRLSCAASGFTFSSYDMSWVRQAPGKRLEWVSTISSGGSFTHYPDSVKGRFTISRDNSKNTLYLQMNSLRAEDTAVYYCVRRSLDWYFDVWGAGTTVTVSS

SEQ ID NO: 739 - protein, 118 aa, Artificial Sequence
  Description of Artificial Sequence: Synthetic polypeptide
  2G4[PD-L1]_H1.4
EVQLLESGGGLVQPGGSLRLSCAASGFTFSSYDMSWVRQAPGKRLEWVSTISSGGSFTHYPDSVKGRFTISRDNSKNTLYLQMNSLRAEDTAVYYCARRSLDWYFDVWGAGTTVTVSS

SEQ ID NO: 740 - protein, 118 aa, Artificial Sequence
  Description of Artificial Sequence: Synthetic polypeptide
  2G4[PD-L1]_H1.5
EVQLLESGGGLVQPGGSLRLSCAASGFTFRSYDMSWVRQAPGKRLEWVSTISSGGSFTHYPDSVKGRFTISRDNSKNTLYLQMNSLRAEDTAVYYCVRRSGDWYFDVWGAGTTVTVSS

SEQ ID NO: 741 - protein, 118 aa, Artificial Sequence
  Description of Artificial Sequence: Synthetic polypeptide
  2G4[PD-L1]_H1.6
EVQLLESGGGLVQPGGSLRLSCAASGFTFHSRDMSWVRQAPGKRLEWVSTISSGGRFTHYPDSVKGRFTISRDNSKNTLYLQMNSLRAEDTAVYYCVRRSGDWYFDVWGAGTTVTVSS

SEQ ID NO: 742 - protein, 118 aa, Artificial Sequence
  Description of Artificial Sequence: Synthetic polypeptide
  2G4[PD-L1]_H1.7
EVQLLESGGGLVQPGGSLRLSCAASGFTFSSYDMSWVRQAPGKRLEWVSTISSGGSFTHYPDSVKGRFTISRDNSKNTLYLQMNSLRAEDTAVYYCVRRSSDWYFDVWGAGTTVTVSS

SEQ ID NO: 743 - protein, 118 aa, Artificial Sequence
  Description of Artificial Sequence: Synthetic polypeptide
  2G4[PD-L1]_H1.8
EVQLLESGGGLVQPGGSLRLSCAASGFTFSSSDMSWVRQAPGKRLEWVSTISSGGSFTHYPDSVKGRFTISRDNSKNTLYLQMNSLRAEDTAVYYCVRRSGDWYFDVWGAGTTVTVSS

SEQ ID NO: 744 - protein, 118 aa, Artificial Sequence
  Description of Artificial Sequence: Synthetic polypeptide
  2G4[PD-L1]_H1.9
EVQLLESGGGLVQPGGSLRLSCAASGFTFSFRDMSWVRQAPGKRLEWVSTISSGGSFTHYPDSVKGRFTISRDNSKNTLYLQMNSLRAEDTAVYYCVRRSGDWYFDVWGAGTTVTVSS

SEQ ID NO: 745 - protein, 118 aa, Artificial Sequence
  Description of Artificial Sequence: Synthetic polypeptide
  2G4[PD-L1]_H1.10
EVQLLESGGGLVQPGGSLRLSCAASGFTFSWYDMSWVRQAPGKRLEWVSTISSGGSFTHYPDSVKGRFTISRDNSKNTLYLQMNSLRAEDTAVYYCVRRSGDWYFDVWGAGTTVTVSS

SEQ ID NO: 746 - protein, 118 aa, Artificial Sequence
  Description of Artificial Sequence: Synthetic polypeptide
  2G4[PD-L1]_H1.11
EVQLLESGGGLVQPGGSLRLSCAASGFTFSVYDMSWVRQAPGKRLEWVSTISSGGSFTHYPDSVKGRFTISRDNSKNTLYLQMNSLRAEDTAVYYCVRRSGDWYFDVWGAGTTVTVSS

SEQ ID NO: 747 - protein, 118 aa, Artificial Sequence
  Description of Artificial Sequence: Synthetic polypeptide
  2G4[PD-L1]_H1.12
EVQLLESGGGLVQPGGSLRLSCAASGFTFSVYDMSWVRQAPGKRLEWVSTISSGGSFTHYPDSVKGRFTISRDNSKNTLYLQMNSLRAEDTAVYYCVRRSLDWYFDVWGAGTTVTVSS

SEQ ID NO: 748 - protein, 118 aa, Artificial Sequence
  Description of Artificial Sequence: Synthetic polypeptide
  2G4[PD-L1]_H1.13
EVQLLESGGGLVQPGGSLRLSCAASGFTFSSKDMSWVRQAPGKRLEWVSTISSGGSFTHYPDSVKGRFTISRDNSKNTLYLQMNSLRAEDTAVYYCVRRSGDWYFDVWGAGTTVTVSS

SEQ ID NO: 749 - protein, 118 aa, Artificial Sequence
  Description of Artificial Sequence: Synthetic polypeptide
  2G4[PD-L1]_H1.14
EVQLLESGGGLVQPGGSLRLSCAASGFTFSSSDMSWVRQAPGKRLEWVSTISSGGSFTHYPDSVKGRFTISRDNSKNTLYLQMNSLRAEDTAVYYCVRRSLDWYFDVWGAGTTVTVSS

SEQ ID NO: 750 - protein, 118 aa, Artificial Sequence
  Description of Artificial Sequence: Synthetic polypeptide
  2G4[PD-L1]_H1.15
EVQLLESGGGLVQPGGSLRLSCAASGFTFSSADMSWVRQAPGKRLEWVSTISSGGSFTHYPDSVKGRFTISRDNSKNTLYLQMNSLRAEDTAVYYCVRRSGDWYFDVWGAGTTVTVSS

SEQ ID NO: 751 - protein, 118 aa, Artificial Sequence
  Description of Artificial Sequence: Synthetic polypeptide
  2G4[PD-L1]_H1.16
EVQLLESGGGLVQPGGSLRLSCAASGFTFSSRDMSWVRQAPGKRLEWVSTISSGGSFTHYPDSVKGRFTISRDNSKNTLYLQMNSLRAEDTAVYYCVRRSGDWYFDVWGAGTTVTVSS

SEQ ID NO: 752 - protein, 118 aa, Artificial Sequence
  Description of Artificial Sequence: Synthetic polypeptide
  2G4[PD-L1]_H1.17
EVQLLESGGGLVQPGGSLRLSCAASGFTFPSRDMSWVRQAPGKRLEWVSTISSGGRFTHYPDSVKGRFTISRDNSKNTLYLQMNSLRAEDTAVYYCVRRSLDWYFDVWGAGTTVTVSS

SEQ ID NO: 753 - protein, 118 aa, Artificial Sequence
  Description of Artificial Sequence: Synthetic polypeptide
  2G4[PD-L1]_H1.18
EVQLLESGGGLVQPGGSLRLSCAASGFTFPSKDMSWVRQAPGKRLEWVSTISSGGRFTHYPDSVKGRFTISRDNSKNTLYLQMNSLRAEDTAVYYCVRRSLDWYFDVWGAGTTVTVSS

SEQ ID NO: 754 - protein, 118 aa, Artificial Sequence
  Description of Artificial Sequence: Synthetic polypeptide
  2G4[PD-L1]_H1.19
EVQLLESGGGLVQPGGSLRLSCAASGFTFHSSDMSWVRQAPGKRLEWVSTISSGGRFTHYPDSVKGRFTISRDNSKNTLYLQMNSLRAEDTAVYYCVRRSLDWYFDVWGAGTTVTVSS

SEQ ID NO: 755 - protein, 118 aa, Artificial Sequence
  Description of Artificial Sequence: Synthetic polypeptide
  2G4[PD-L1]_H1.20
EVQLLESGGGLVQPGGSLRLSCAASGFTFHSADMSWVRQAPGKRLEWVSTISSGGRFTHYPDSVKGRFTISRDNSKNTLYLQMNSLRAEDTAVYYCVRRSLDWYFDVWGAGTTVTVSS

SEQ ID NO: 756 - protein, 118 aa, Artificial Sequence
  Description of Artificial Sequence: Synthetic polypeptide
  2G4[PD-L1]_H1.21
EVQLLESGGGLVQPGGSLRLSCAASGFTFSWADMSWVRQAPGKRLEWVSTISSGGRFTHYPDSVKGRFTISRDNSKNTLYLQMNSLRAEDTAVYYCVRRSLDWYFDVWGAGTTVTVSS

SEQ ID NO: 757 - protein, 118 aa, Artificial Sequence
  Description of Artificial Sequence: Synthetic polypeptide
  2G4[PD-L1]_H1.22
EVQLLESGGGLVQPGGSLRLSCAASGFTFSVRDMSWVRQAPGKRLEWVSTISSGGRFTHYPDSVKGRFTISRDNSKNTLYLQMNSLRAEDTAVYYCVRRSLDWYFDVWGAGTTVTVSS

SEQ ID NO: 758 - protein, 118 aa, Artificial Sequence
  Description of Artificial Sequence: Synthetic polypeptide
  2G4[PD-L1]_H1.23
EVQLLESGGGLVQPGGSLRLSCAASGFTFSVKDMSWVRQAPGKRLEWVSTISSGGRFTHYPDSVKGRFTISRDNSKNTLYLQMNSLRAEDTAVYYCVRRSLDWYFDVWGAGTTVTVSS

SEQ ID NO: 759 - protein, 118 aa, Artificial Sequence
  Description of Artificial Sequence: Synthetic polypeptide
  2G4[PD-L1]_H1.24
EVQLLESGGGLVQPGGSLRLSCAASGFTFSFSDMSWVRQAPGKRLEWVSTISSGGRFTHYPDSVKGRFTISRDNSKNTLYLQMNSLRAEDTAVYYCVRRSLDWYFDVWGAGTTVTVSS

SEQ ID NO: 760 - protein, 118 aa, Artificial Sequence
  Description of Artificial Sequence: Synthetic polypeptide
  2G4[PD-L1]_H1.25
EVQLLESGGGLVQPGGSLRLSCAASGFTFSFRDMSWVRQAPGKRLEWVSTISSGGRFTHYPDSVKGRFTISRDNSKNTLYLQMNSLRAEDTAVYYCVRRSLDWYFDVWGAGTTVTVSS

SEQ ID NO: 761 - protein, 118 aa, Artificial Sequence
  Description of Artificial Sequence: Synthetic polypeptide
  2G4[PD-L1]_H1.26
EVQLLESGGGLVQPGGSLRLSCAASGFTFSVSDMSWVRQAPGKRLEWVSTISSGGRFTHYPDSVKGRFTISRDNSKNTLYLQMNSLRAEDTAVYYCVRRSLDWYFDVWGAGTTVTVSS

SEQ ID NO: 762 - protein, 118 aa, Artificial Sequence
  Description of Artificial Sequence: Synthetic polypeptide
  2G4[PD-L1]_H1.27
EVQLLESGGGLVQPGGSLRLSCAASGFTFSQSDMSWVRQAPGKRLEWVSTISSGGRFTHYPDSVKGRFTISRDNSKNTLYLQMNSLRAEDTAVYYCVRRSLDWYFDVWGAGTTVTVSS

SEQ ID NO: 763 - protein, 118 aa, Artificial Sequence
  Description of Artificial Sequence: Synthetic polypeptide
  2G4[PD-L1]_H1.28
EVQLLESGGGLVQPGGSLRLSCAASGFTFPSSDMSWVRQAPGKRLEWVSTISSGGRFTHYPDSVKGRFTISRDNSKNTLYLQMNSLRAEDTAVYYCVRRSLDWYFDVWGAGTTVTVSS

SEQ ID NO: 764 - protein, 118 aa, Artificial Sequence
  Description of Artificial Sequence: Synthetic polypeptide
  2G4[PD-L1]_H1.29
EVQLLESGGGLVQPGGSLRLSCAASGFTFSQKDMSWVRQAPGKRLEWVSTISSGGRFTHYPDSVKGRFTISRDNSKNTLYLQMNSLRAEDTAVYYCVRRSLDWYFDVWGAGTTVTVSS

SEQ ID NO: 765 - protein, 118 aa, Artificial Sequence
  Description of Artificial Sequence: Synthetic polypeptide
  2G4[PD-L1]_H1.30
EVQLLESGGGLVQPGGSLRLSCAASGFTFSQYDMSWVRQAPGKRLEWVSTISSGGRFTHYPDSVKGRFTISRDNSKNTLYLQMNSLRAEDTAVYYCVRRSLDWYFDVWGAGTTVTVSS

SEQ ID NO: 766 - protein, 118 aa, Artificial Sequence
  Description of Artificial Sequence: Synthetic polypeptide
  2G4[PD-L1]_H1.31
EVQLLESGGGLVQPGGSLRLSCAASGFTFRSYDMSWVRQAPGKRLEWVSTISSGGRFTHYPDSVKGRFTISRDNSKNTLYLQMNSLRAEDTAVYYCVRRSLDWYFDVWGAGTTVTVSS

SEQ ID NO: 767 - protein, 118 aa, Artificial Sequence
  Description of Artificial Sequence: Synthetic polypeptide
  2G4[PD-L1]_H1.32
EVQLLESGGGLVQPGGSLRLSCAASGFTFSSSDMSWVRQAPGKRLEWVSTISSGGRFTHYPDSVKGRFTISRDNSKNTLYLQMNSLRAEDTAVYYCVRRSLDWYFDVWGAGTTVTVSS

SEQ ID NO: 768 - protein, 118 aa, Artificial Sequence
  Description of Artificial Sequence: Synthetic polypeptide
  2G4[PD-L1]_H1.33
EVQLLESGGGLVQPGGSLRLSCAASGFTFSWYDMSWVRQAPGKRLEWVSTISSGGRFTHYPDSVKGRFTISRDNSKNTLYLQMNSLRAEDTAVYYCVRRSLDWYFDVWGAGTTVTVSS

SEQ ID NO: 769 - protein, 118 aa, Artificial Sequence
  Description of Artificial Sequence: Synthetic polypeptide
  2G4[PD-L1]_H1.34
EVQLLESGGGLVQPGGSLRLSCAASGFTFSVYDMSWVRQAPGKRLEWVSTISSGGRFTHYPDSVKGRFTISRDNSKNTLYLQMNSLRAEDTAVYYCVRRSLDWYFDVWGAGTTVTVSS

SEQ ID NO: 770 - protein, 118 aa, Artificial Sequence
  Description of Artificial Sequence: Synthetic polypeptide
  2G4[PD-L1]_H1.35
EVQLLESGGGLVQPGGSLRLSCAASGFTFSSKDMSWVRQAPGKRLEWVSTISSGGRFTHYPDSVKGRFTISRDNSKNTLYLQMNSLRAEDTAVYYCVRRSLDWYFDVWGAGTTVTVSS

SEQ ID NO: 771 - protein, 118 aa, Artificial Sequence
  Description of Artificial Sequence: Synthetic polypeptide
  2G4[PD-L1]_H1.36
EVQLLESGGGLVQPGGSLRLSCAASGFTFSSADMSWVRQAPGKRLEWVSTISSGGRFTHYPDSVKGRFTISRDNSKNTLYLQMNSLRAEDTAVYYCVRRSLDWYFDVWGAGTTVTVSS

SEQ ID NO: 772 - protein, 118 aa, Artificial Sequence
  Description of Artificial Sequence: Synthetic polypeptide
  2G4[PD-L1]_H1.37
EVQLLESGGGLVQPGGSLRLSCAASGFTFSSRDMSWVRQAPGKRLEWVSTISSGGRFTHYPDSVKGRFTISRDNSKNTLYLQMNSLRAEDTAVYYCVRRSLDWYFDVWGAGTTVTVSS

SEQ ID NO: 773 - protein, 118 aa, Artificial Sequence
  Description of Artificial Sequence: Synthetic polypeptide
  2G4[PD-L1]_H1.38
EVQLLESGGGLVQPGGSLRLSCAASGFTFPSRDMSWVRQAPGKRLEWVSTISSGGRFTHYPDSVKGRFTISRDNSKNTLYLQMNSLRAEDTAVYYCARRSLDWYFDVWGAGTTVTVSS

SEQ ID NO: 774 - protein, 118 aa, Artificial Sequence
  Description of Artificial Sequence: Synthetic polypeptide
  2G4[PD-L1]_H1.39
EVQLLESGGGLVQPGGSLRLSCAASGFTFPSKDMSWVRQAPGKRLEWVSTISSGGRFTHYPDSVKGRFTISRDNSKNTLYLQMNSLRAEDTAVYYCARRSLDWYFDVWGAGTTVTVSS

SEQ ID NO: 775 - protein, 118 aa, Artificial Sequence
  Description of Artificial Sequence: Synthetic polypeptide
  2G4[PD-L1]_H1.40
EVQLLESGGGLVQPGGSLRLSCAASGFTFHSSDMSWVRQAPGKRLEWVSTISSGGRFTHYPDSVKGRFTISRDNSKNTLYLQMNSLRAEDTAVYYCARRSLDWYFDVWGAGTTVTVSS

SEQ ID NO: 776 - protein, 118 aa, Artificial Sequence
  Description of Artificial Sequence: Synthetic polypeptide
  2G4[PD-L1]_H1.41
EVQLLESGGGLVQPGGSLRLSCAASGFTFHSADMSWVRQAPGKRLEWVSTISSGGRFTHYPDSVKGRFTISRDNSKNTLYLQMNSLRAEDTAVYYCARRSLDWYFDVWGAGTTVTVSS

SEQ ID NO: 777 - protein, 118 aa, Artificial Sequence
  Description of Artificial Sequence: Synthetic polypeptide
  2G4[PD-L1]_H1.42
EVQLLESGGGLVQPGGSLRLSCAASGFTFSWADMSWVRQAPGKRLEWVSTISSGGRFTHYPDSVKGRFTISRDNSKNTLYLQMNSLRAEDTAVYYCARRSLDWYFDVWGAGTTVTVSS

SEQ ID NO: 778 - protein, 118 aa, Artificial Sequence
  Description of Artificial Sequence: Synthetic polypeptide
  2G4[PD-L1]_H1.43
EVQLLESGGGLVQPGGSLRLSCAASGFTFSVRDMSWVRQAPGKRLEWVSTISSGGRFTHYPDSVKGRFTISRDNSKNTLYLQMNSLRAEDTAVYYCARRSLDWYFDVWGAGTTVTVSS

SEQ ID NO: 779 - protein, 118 aa, Artificial Sequence
  Description of Artificial Sequence: Synthetic polypeptide
  2G4[PD-L1]_H1.44
EVQLLESGGGLVQPGGSLRLSCAASGFTFSVKDMSWVRQAPGKRLEWVSTISSGGRFTHYPDSVKGRFTISRDNSKNTLYLQMNSLRAEDTAVYYCARRSLDWYFDVWGAGTTVTVSS

SEQ ID NO: 780 - protein, 118 aa, Artificial Sequence
  Description of Artificial Sequence: Synthetic polypeptide
  2G4[PD-L1]_H1.45
EVQLLESGGGLVQPGGSLRLSCAASGFTFSFSDMSWVRQAPGKRLEWVSTISSGGRFTHYPDSVKGRFTISRDNSKNTLYLQMNSLRAEDTAVYYCARRSLDWYFDVWGAGTTVTVSS

SEQ ID NO: 781 - protein, 118 aa, Artificial Sequence
  Description of Artificial Sequence: Synthetic polypeptide
  2G4[PD-L1]_H1.46
EVQLLESGGGLVQPGGSLRLSCAASGFTFSFRDMSWVRQAPGKRLEWVSTISSGGRFTHYPDSVKGRFTISRDNSKNTLYLQMNSLRAEDTAVYYCARRSLDWYFDVWGAGTTVTVSS

SEQ ID NO: 782 - protein, 118 aa, Artificial Sequence
  Description of Artificial Sequence: Synthetic polypeptide
  2G4[PD-L1]_H1.47
EVQLLESGGGLVQPGGSLRLSCAASGFTFSVSDMSWVRQAPGKRLEWVSTISSGGRFTHYPDSVKGRFTISRDNSKNTLYLQMNSLRAEDTAVYYCARRSLDWYFDVWGAGTTVTVSS

SEQ ID NO: 783 - protein, 118 aa, Artificial Sequence
  Description of Artificial Sequence: Synthetic polypeptide
  2G4[PD-L1]_H1.48
EVQLLESGGGLVQPGGSLRLSCAASGFTFSQSDMSWVRQAPGKRLEWVSTISSGGRFTHYPDSVKGRFTISRDNSKNTLYLQMNSLRAEDTAVYYCARRSLDWYFDVWGAGTTVTVSS

SEQ ID NO: 784 - protein, 118 aa, Artificial Sequence
  Description of Artificial Sequence: Synthetic polypeptide
  2G4[PD-L1]_H1.49
EVQLLESGGGLVQPGGSLRLSCAASGFTFPSSDMSWVRQAPGKRLEWVSTISSGGRFTHYPDSVKGRFTISRDNSKNTLYLQMNSLRAEDTAVYYCARRSLDWYFDVWGAGTTVTVSS

SEQ ID NO: 785 - protein, 118 aa, Artificial Sequence
  Description of Artificial Sequence: Synthetic polypeptide
  2G4[PD-L1]_H1.50
EVQLLESGGGLVQPGGSLRLSCAASGFTFSQKDMSWVRQAPGKRLEWVSTISSGGRFTHYPDSVKGRFTISRDNSKNTLYLQMNSLRAEDTAVYYCARRSLDWYFDVWGAGTTVTVSS

SEQ ID NO: 786 - protein, 118 aa, Artificial Sequence
  Description of Artificial Sequence: Synthetic polypeptide
  2G4[PD-L1]_H1.51
EVQLLESGGGLVQPGGSLRLSCAASGFTFSQYDMSWVRQAPGKRLEWVSTISSGGRFTHYPDSVKGRFTISRDNSKNTLYLQMNSLRAEDTAVYYCARRSLDWYFDVWGAGTTVTVSS

SEQ ID NO: 787 - protein, 118 aa, Artificial Sequence
  Description of Artificial Sequence: Synthetic polypeptide
  2G4[PD-L1]_H1.52
EVQLLESGGGLVQPGGSLRLSCAASGFTFRSYDMSWVRQAPGKRLEWVSTISSGGRFTHYPDSVKGRFTISRDNSKNTLYLQMNSLRAEDTAVYYCARRSLDWYFDVWGAGTTVTVSS

SEQ ID NO: 788 - protein, 118 aa, Artificial Sequence
  Description of Artificial Sequence: Synthetic polypeptide
  2G4[PD-L1]_H1.53
EVQLLESGGGLVQPGGSLRLSCAASGFTFSSSDMSWVRQAPGKRLEWVSTISSGGRFTHYPDSVKGRFTISRDNSKNTLYLQMNSLRAEDTAVYYCARRSLDWYFDVWGAGTTVTVSS

SEQ ID NO: 789 - protein, 118 aa, Artificial Sequence
  Description of Artificial Sequence: Synthetic polypeptide
  2G4[PD-L1]_H1.54
EVQLLESGGGLVQPGGSLRLSCAASGFTFSWYDMSWVRQAPGKRLEWVSTISSGGRFTHYPDSVKGRFTISRDNSKNTLYLQMNSLRAEDTAVYYCARRSLDWYFDVWGAGTTVTVSS

SEQ ID NO: 790 - protein, 118 aa, Artificial Sequence
  Description of Artificial Sequence: Synthetic polypeptide
  2G4[PD-L1]_H1.55
EVQLLESGGGLVQPGGSLRLSCAASGFTFSVYDMSWVRQAPGKRLEWVSTISSGGRFTHYPDSVKGRFTISRDNSKNTLYLQMNSLRAEDTAVYYCARRSLDWYFDVWGAGTTVTVSS

SEQ ID NO: 791 - protein, 118 aa, Artificial Sequence
  Description of Artificial Sequence: Synthetic polypeptide
  2G4[PD-L1]_H1.56
EVQLLESGGGLVQPGGSLRLSCAASGFTFSSKDMSWVRQAPGKRLEWVSTISSGGRFTHYPDSVKGRFTISRDNSKNTLYLQMNSLRAEDTAVYYCARRSLDWYFDVWGAGTTVTVSS

SEQ ID NO: 792 - protein, 118 aa, Artificial Sequence
  Description of Artificial Sequence: Synthetic polypeptide
  2G4[PD-L1]_H1.57
EVQLLESGGGLVQPGGSLRLSCAASGFTFSSADMSWVRQAPGKRLEWVSTISSGGRFTHYPDSVKGRFTISRDNSKNTLYLQMNSLRAEDTAVYYCARRSLDWYFDVWGAGTTVTVSS

SEQ ID NO: 793 - protein, 118 aa, Artificial Sequence
  Description of Artificial Sequence: Synthetic polypeptide
  2G4[PD-L1]_H1.58
EVQLLESGGGLVQPGGSLRLSCAASGFTFSSRDMSWVRQAPGKRLEWVSTISSGGRFTHYPDSVKGRFTISRDNSKNTLYLQMNSLRAEDTAVYYCARRSLDWYFDVWGAGTTVTVSS

SEQ ID NO: 794 - protein, 118 aa, Artificial Sequence
  Description of Artificial Sequence: Synthetic polypeptide
  2G4[PD-L1]_H1.59
EVQLLESGGGLVQPGGSLRLSCAASGFTFHSRDMSWVRQAPGKGLEWVSTISSGGRFTHYPDSVKGRFTISRDNSKNTLYLQMNSLRAEDTAVYYCARRSGDWYFDVWGAGTTVTVSS

SEQ ID NO: 795 - protein, 118 aa, Artificial Sequence
  Description of Artificial Sequence: Synthetic polypeptide
  2G4[PD-L1]_H1.60
EVQLLESGGGLVQPGGSLRLSCAASGFTFSSSDMSWVRQAPGKGLEWVSTISSGGSFTHYPDSVKGRFTISRDNSKNTLYLQMNSLRAEDTAVYYCARRSLDWYFDVWGAGTTVTVSS

SEQ ID NO: 796 - protein, 118 aa, Artificial Sequence
  Description of Artificial Sequence: Synthetic polypeptide
  2G4[PD-L1]_H1.61
EVQLLESGGGLVQPGGSLRLSCAASGFTFSSYDMSWVRQAPGKGLEWVSTISSGGSFTHYPDSVKGRFTISRDNSKNTLYLQMNSLRAEDTAVYYCARRSLDWYFDVWGAGTTVTVSS

SEQ ID NO: 797 - protein, 118 aa, Artificial Sequence
  Description of Artificial Sequence: Synthetic polypeptide
  2G4[PD-L1]_H1.62
EVQLLESGGGLVQPGGSLRLSCAASGFTFSSYDMSWVRQAPGKGLEWVSTISSGGSFTHYPDSVKGRFTISRDNSKNTLYLQMNSLRAEDTAVYYCARRSGDWYFDVWGAGTTVTVSS

SEQ ID NO: 798 - protein, 109 aa, Artificial Sequence
  Description of Artificial Sequence: Synthetic polypeptide
  2G4[PD-L1]_L1.1
EIVLTQSPGTLSLSPGERATLSCRVSSSISSSNLHWYQQKPGQSPRPLIYGTSNLASGVPVRFSGSGSGTDYTLTISRLEPEDFAVYYCQQWWSYPLYTFGGGTKVEIK

SEQ ID NO: 799 - protein, 109 aa, Artificial Sequence
  Description of Artificial Sequence: Synthetic polypeptide
  2G4[PD-L1]_L1.2
EIVLTQSPGTLSLSPGERATLSCRVSSSISSSNLHWYQQKPGQSPRPLIYGTSNLASGVPVRFSGSGSGTDYTLTISRLEPEDFAVYYCQQWFSYPLYTFGGGTKVEIK

SEQ ID NO: 800 - protein, 109 aa, Artificial Sequence
  Description of Artificial Sequence: Synthetic polypeptide
  2G4[PD-L1]_L1.3
EIVLTQSPGTLSLSPGERATLSCRVSSSISSSNLHWYQQKPGQSPRPLIYGTSNLASGVPVRFSGSGSGTDYTLTISRLEPEDFAVYYCQQWSSYPLWTFGGGTKVEIK

SEQ ID NO: 801 - protein, 109 aa, Artificial Sequence
  Description of Artificial Sequence: Synthetic polypeptide
  2G4[PD-L1]_L1.4
EIVLTQSPGTLSLSPGERATLSCRVSWSGSSSNLHWYQQKPGQSPRLLIYGTSNLAGGVPVRFSGSGSGTDYTLTISRLEPEDFAVYYCQQWSSYPLYTFGGGTKVEIK

SEQ ID NO: 802 - protein, 109 aa, Artificial Sequence
  Description of Artificial Sequence: Synthetic polypeptide
  2G4[PD-L1]_L1.5
EIVLTQSPGTLSLSPGERATLSCRVSSSISSSNLHWYQQKPGQSPRPLIYGTSNLASGVPVRFSGSGSGTDYTLTISRLEPEDFAVYYCQQWHSYPLYTFGGGTKVEIK

SEQ ID NO: 803 - protein, 109 aa, Artificial Sequence
  Description of Artificial Sequence: Synthetic polypeptide
  2G4[PD-L1]_L1.6
EIVLTQSPGTLSLSPGERATLSCRVSSFIVSSNLHWYQQKPGQSPRPLIYGTSNLASGVPVRFSGSGSGTDYTLTISRLEPEDFAVYYCQQWSSYPLYTFGGGTKVEIK

SEQ ID NO: 804 - protein, 109 aa, Artificial Sequence
  Description of Artificial Sequence: Synthetic polypeptide
  2G4[PD-L1]_L1.7
EIVLTQSPGTLSLSPGERATLSCRVSSSINFSNLHWYQQKPGQSPRPLIYGTSNLASGVPVRFSGSGSGTDYTLTISRLEPEDFAVYYCQQWSSYPLYTFGGGTKVEIK

SEQ ID NO: 805 - protein, 109 aa, Artificial Sequence
  Description of Artificial Sequence: Synthetic polypeptide
  2G4[PD-L1]_L1.8
EIVLTQSPGTLSLSPGERATLSCRVSLSINSSNLHWYQQKPGQSPRPLIYGTNLLASGVPVRFSGSGSGTDYTLTISRLEPEDFAVYYCQQWSSYPLYTFGGGTKVEIK

SEQ ID NO: 806 - protein, 109 aa, Artificial Sequence
  Description of Artificial Sequence: Synthetic polypeptide
  2G4[PD-L1]_L1.9
EIVLTQSPGTLSLSPGERATLSCRVSSSIIRSNLHWYQQKPGQSPRPLIYGTSQLASGVPVRFSGSGSGTDYTLTISRLEPEDFAVYYCQQWSSYPLYTFGGGTKVEIK

SEQ ID NO: 807 - protein, 109 aa, Artificial Sequence
  Description of Artificial Sequence: Synthetic polypeptide
  2G4[PD-L1]_L1.10
EIVLTQSPGTLSLSPGERATLSCRVSSSINSTNLHWYQQKPGQSPRPLIYGTSVLATGVPVRFSGSGSGTDYTLTISRLEPEDFAVYYCQQWSSYPLYTFGGGTKVEIK

SEQ ID NO: 808 - protein, 109 aa, Artificial Sequence
  Description of Artificial Sequence: Synthetic polypeptide
  2G4[PD-L1]_L1.11
EIVLTQSPGTLSLSPGERATLSCRVSSSINPSNLHWYQQKPGQSPRPLIYGTSNLASGVPVRFSGSGSGTDYTLTISRLEPEDFAVYYCQQWSSYPLYTFGGGTKVEIK

SEQ ID NO: 809 - protein, 109 aa, Artificial Sequence
  Description of Artificial Sequence: Synthetic polypeptide
  2G4[PD-L1]_L1.12
EIVLTQSPGTLSLSPGERATLSCRASSSITSSNLHWYQQKPGQSPRPLIYGTSNLASGVPVRFSGSGSGTDYTLTISRLEPEDFAVYYCQQWSSYPLYTFGGGTKVEIK

SEQ ID NO: 810 - protein, 109 aa, Artificial Sequence
  Description of Artificial Sequence: Synthetic polypeptide
  2G4[PD-L1]_L1.13
EIVLTQSPGTLSLSPGERATLSCRASSSMVSSNLHWYQQKPGQSPRPLIYGTSNLASGVPVRFSGSGSGTDYTLTISRLEPEDFAVYYCQQWSSYPLYTFGGGTKVEIK

SEQ ID NO: 811 - protein, 109 aa, Artificial Sequence
  Description of Artificial Sequence: Synthetic polypeptide
  2G4[PD-L1]_L1.14
EIVLTQSPGTLSLSPGERATLSCRVSSSIQSSNLHWYQQKPGQSPRPLIYGTSNLASGVPVRFSGSGSGTDYTLTISRLEPEDFAVYYCQQWSSYPLYTFGGGTKVEIK

SEQ ID NO: 812 - protein, 109 aa, Artificial Sequence
  Description of Artificial Sequence: Synthetic polypeptide
  2G4[PD-L1]_L1.15
EIVLTQSPGTLSLSPGERATLSCRVSSSIQLSNLHWYQQKPGQSPRPLIYGTSNLASGVPVRFSGSGSGTDYTLTISRLEPEDFAVYYCQQWSSYPLYTFGGGTKVEIK

SEQ ID NO: 813 - protein, 109 aa, Artificial Sequence
  Description of Artificial Sequence: Synthetic polypeptide
  2G4[PD-L1]_L1.16
EIVLTQSPGTLSLSPGERATLSCRASSSINDSNLHWYQQKPGQSPRLLIYGTSNLRSGVPVRFSGSGSGTDYTLTISRLEPEDFAVYYCQQWSSYPLYTFGGGTKVEIK

SEQ ID NO: 814 - protein, 109 aa, Artificial Sequence
  Description of Artificial Sequence: Synthetic polypeptide
  2G4[PD-L1]_L1.17
EIVLTQSPGTLSLSPGERATLSCRVSSSISLSNLHWYQQKPGQSPRPLIYGTSNLASGVPVRFSGSGSGTDYTLTISRLEPEDFAVYYCQQWSSYPLYTFGGGTKVEIK

SEQ ID NO: 815 - protein, 109 aa, Artificial Sequence
  Description of Artificial Sequence: Synthetic polypeptide
  2G4[PD-L1]_L1.18
EIVLTQSPGTLSLSPGERATLSCRASSRISRSNLHWYQQKPGQSPRPLIYGTINLASGVPVRFSGSGSGTDYTLTISRLEPEDFAVYYCQQWSSYPLYTFGGGTKVEIK

SEQ ID NO: 816 - protein, 109 aa, Artificial Sequence
  Description of Artificial Sequence: Synthetic polypeptide
  2G4[PD-L1]_L1.19
EIVLTQSPGTLSLSPGERATLSCRVSSSINGSNLHWYQQKPGQSPRPLIYGTSNLASGVPVRFSGSGSGTDYTLTISRLEPEDFAVYYCQQWSSYPLYTFGGGTKVEIK

SEQ ID NO: 817 - protein, 109 aa, Artificial Sequence
  Description of Artificial Sequence: Synthetic polypeptide
  2G4[PD-L1]_L1.20
EIVLTQSPGTLSLSPGERATLSCRVSSSINSSNLHWYQQKPGQSPRPLIYGTSNLASGVPVRFSGSGSGTDYTLTISRLEPEDFAVYYCQQWSSYPLYTFGGGTKVEIK

SEQ ID NO: 818 - protein, 109 aa, Artificial Sequence
  Description of Artificial Sequence: Synthetic polypeptide
  2G4[PD-L1]_L1.21
EIVLTQSPGTLSLSPGERATLSCRVSYSISRSNLHWYQQKPGQSPRPLIYGTSNRLSGVPVRFSGSGSGTDYTLTISRLEPEDFAVYYCQQWSSYPLYTFGGGTKVEIK

SEQ ID NO: 819 - protein, 109 aa, Artificial Sequence
  Description of Artificial Sequence: Synthetic polypeptide
  2G4[PD-L1]_L1.22
EIVLTQSPGTLSLSPGERATLSCRVSSSIQFSNLHWYQQKPGQSPRPLIYGTSNLASGVPVRFSGSGSGTDYTLTISRLEPEDFAVYYCQQWSSYPLYTFGGGTKVEIK

SEQ ID NO: 820 - protein, 109 aa, Artificial Sequence
  Description of Artificial Sequence: Synthetic polypeptide
  2G4[PD-L1]_L1.23
EIVLTQSPGTLSLSPGERATLSCRVSLSIQSSNLHWYQQKPGQSPRPLIYGTNLLASGVPVRFSGSGSGTDYTLTISRLEPEDFAVYYCQQWSSYPLYTFGGGTKVEIK

SEQ ID NO: 821 - protein, 109 aa, Artificial Sequence
  Description of Artificial Sequence: Synthetic polypeptide
  2G4[PD-L1]_L1.24
EIVLTQSPGTLSLSPGERATLSCRVSSSIQSTNLHWYQQKPGQSPRPLIYGTSVLATGVPVRFSGSGSGTDYTLTISRLEPEDFAVYYCQQWSSYPLYTFGGGTKVEIK

SEQ ID NO: 822 - protein, 109 aa, Artificial Sequence
  Description of Artificial Sequence: Synthetic polypeptide
  2G4[PD-L1]_L1.25
EIVLTQSPGTLSLSPGERATLSCRVSSSIQPSNLHWYQQKPGQSPRPLIYGTSNLASGVPVRFSGSGSGTDYTLTISRLEPEDFAVYYCQQWSSYPLYTFGGGTKVEIK

SEQ ID NO: 823 - protein, 109 aa, Artificial Sequence
  Description of Artificial Sequence: Synthetic polypeptide
  2G4[PD-L1]_L1.26
EIVLTQSPGTLSLSPGERATLSCRASSSIQDSNLHWYQQKPGQSPRLLIYGTSNLRSGVPVRFSGSGSGTDYTLTISRLEPEDFAVYYCQQWSSYPLYTFGGGTKVEIK

SEQ ID NO: 824 - protein, 109 aa, Artificial Sequence
  Description of Artificial Sequence: Synthetic polypeptide
  2G4[PD-L1]_L1.27
EIVLTQSPGTLSLSPGERATLSCRVSSSIQGSNLHWYQQKPGQSPRPLIYGTSNLASGVPVRFSGSGSGTDYTLTISRLEPEDFAVYYCQQWSSYPLYTFGGGTKVEIK

SEQ ID NO: 825 - protein, 109 aa, Artificial Sequence
  Description of Artificial Sequence: Synthetic polypeptide
  2G4[PD-L1]_L1.28
EIVLTQSPGTLSLSPGERATLSCRVSSFIVLSNLHWYQQKPGQSPRPLIYGTSVLATGVPVRFSGSGSGTDYTLTISRLEPEDFAVYYCQQWSSYPLWTFGGGTKVEIK

SEQ ID NO: 826 - protein, 109 aa, Artificial Sequence
  Description of Artificial Sequence: Synthetic polypeptide
  2G4[PD-L1]_L1.29
EIVLTQSPGTLSLSPGERATLSCRVSSRIVLSNLHWYQQKPGQSPRPLIYGTSVLATGVPVRFSGSGSGTDYTLTISRLEPEDFAVYYCQQWSSYPLWTFGGGTKVEIK

SEQ ID NO: 827 - protein, 109 aa, Artificial Sequence
  Description of Artificial Sequence: Synthetic polypeptide
  2G4[PD-L1]_L1.30
EIVLTQSPGTLSLSPGERATLSCRASSFIVLSNLHWYQQKPGQSPRPLIYGTSVLATGVPVRFSGSGSGTDYTLTISRLEPEDFAVYYCQQWSSYPLWTFGGGTKVEIK

SEQ ID NO: 828 - protein, 109 aa, Artificial Sequence
  Description of Artificial Sequence: Synthetic polypeptide
  2G4[PD-L1]_L1.31
EIVLTQSPGTLSLSPGERATLSCRASSRIVLSNLHWYQQKPGQSPRPLIYGTSVLATGVPVRFSGSGSGTDYTLTISRLEPEDFAVYYCQQWSSYPLWTFGGGTKVEIK

SEQ ID NO: 829 - protein, 109 aa, Artificial Sequence
  Description of Artificial Sequence: Synthetic polypeptide
  2G4[PD-L1]_L1.32
EIVLTQSPGTLSLSPGERATLSCRVSSFIQLSNLHWYQQKPGQSPRPLIYGTSVLATGVPVRFSGSGSGTDYTLTISRLEPEDFAVYYCQQWSSYPLWTFGGGTKVEIK

SEQ ID NO: 830 - protein, 109 aa, Artificial Sequence
  Description of Artificial Sequence: Synthetic polypeptide
  2G4[PD-L1]_L1.33
EIVLTQSPGTLSLSPGERATLSCRVSSRIQLSNLHWYQQKPGQSPRPLIYGTSVLATGVPVRFSGSGSGTDYTLTISRLEPEDFAVYYCQQWSSYPLWTFGGGTKVEIK

SEQ ID NO: 831 - protein, 109 aa, Artificial Sequence
  Description of Artificial Sequence: Synthetic polypeptide
  2G4[PD-L1]_L1.34
EIVLTQSPGTLSLSPGERATLSCRASSFIQLSNLHWYQQKPGQSPRLLIYGTSVLATGVPVRFSGSGSGTDYTLTISRLEPEDFAVYYCQQWSSYPLWTFGGGTKVEIK

SEQ ID NO: 832 - protein, 109 aa, Artificial Sequence
  Description of Artificial Sequence: Synthetic polypeptide
  2G4[PD-L1]_L1.35
EIVLTQSPGTLSLSPGERATLSCRASSRIQLSNLHWYQQKPGQSPRPLIYGTSVLATGVPVRFSGSGSGTDYTLTISRLEPEDFAVYYCQQWSSYPLWTFGGGTKVEIK

SEQ ID NO: 833 - protein, 109 aa, Artificial Sequence
  Description of Artificial Sequence: Synthetic polypeptide
  2G4[PD-L1]_L1.36
EIVLTQSPGTLSLSPGERATLSCRVSSFISRSNLHWYQQKPGQSPRPLIYGTSVLATGVPVRFSGSGSGTDYTLTISRLEPEDFAVYYCQQWSSYPLWTFGGGTKVEIK

SEQ ID NO: 834 - protein, 109 aa, Artificial Sequence
  Description of Artificial Sequence: Synthetic polypeptide
  2G4[PD-L1]_L1.37
EIVLTQSPGTLSLSPGERATLSCRVSSRISRSNLHWYQQKPGQSPRPLIYGTSVLATGVPVRFSGSGSGTDYTLTISRLEPEDFAVYYCQQWSSYPLWTFGGGTKVEIK

SEQ ID NO: 835 - protein, 109 aa, Artificial Sequence
  Description of Artificial Sequence: Synthetic polypeptide
  2G4[PD-L1]_L1.38
EIVLTQSPGTLSLSPGERATLSCRASSFISRSNLHWYQQKPGQSPRPLIYGTSVLATGVPVRFSGSGSGTDYTLTISRLEPEDFAVYYCQQWSSYPLWTFGGGTKVEIK

SEQ ID NO: 836 - protein, 109 aa, Artificial Sequence
  Description of Artificial Sequence: Synthetic polypeptide
  2G4[PD-L1]_L1.39
EIVLTQSPGTLSLSPGERATLSCRASSRISRSNLHWYQQKPGQSPRPLIYGTSVLATGVPVRFSGSGSGTDYTLTISRLEPEDFAVYYCQQWSSYPLWTFGGGTKVEIK

SEQ ID NO: 837 - protein, 109 aa, Artificial Sequence
  Description of Artificial Sequence: Synthetic polypeptide
  2G4[PD-L1]_L1.40
EIVLTQSPGTLSLSPGERATLSCRVSSFIQRSNLHWYQQKPGQSPRPLIYGTSVLATGVPVRFSGSGSGTDYTLTISRLEPEDFAVYYCQQWSSYPLWTFGGGTKVEIK

SEQ ID NO: 838 - protein, 109 aa, Artificial Sequence
  Description of Artificial Sequence: Synthetic polypeptide
  2G4[PD-L1]_L1.41
EIVLTQSPGTLSLSPGERATLSCRVSSRIQRSNLHWYQQKPGQSPRPLIYGTSVLATGVPVRFSGSGSGTDYTLTISRLEPEDFAVYYCQQWSSYPLWTFGGGTKVEIK

SEQ ID NO: 839 - protein, 109 aa, Artificial Sequence
  Description of Artificial Sequence: Synthetic polypeptide
  2G4[PD-L1]_L1.42
EIVLTQSPGTLSLSPGERATLSCRASSFIQRSNLHWYQQKPGQSPRPLIYGTSVLATGVPVRFSGSGSGTDYTLTISRLEPEDFAVYYCQQWSSYPLWTFGGGTKVEIK

SEQ ID NO: 840 - protein, 109 aa, Artificial Sequence
  Description of Artificial Sequence: Synthetic polypeptide
  2G4[PD-L1]_L1.43
EIVLTQSPGTLSLSPGERATLSCRASSRIQRSNLHWYQQKPGQSPRPLIYGTSVLATGVPVRFSGSGSGTDYTLTISRLEPEDFAVYYCQQWSSYPLWTFGGGTKVEIK

SEQ ID NO: 841 - protein, 109 aa, Artificial Sequence
  Description of Artificial Sequence: Synthetic polypeptide
  2G4[PD-L1]_L1.44
EIVLTQSPGTLSLSPGERATLSCRVSSFIVLSNLHWYQQKPGQSPRPLIYGTSVLATGVPVRFSGSGSGTDYTLTISRLEPEDFAVYYCQQWSSYPLYTFGGGTKVEIK

SEQ ID NO: 842 - protein, 109 aa, Artificial Sequence
  Description of Artificial Sequence: Synthetic polypeptide
  2G4[PD-L1]_L1.45
EIVLTQSPGTLSLSPGERATLSCRVSSRIVLSNLHWYQQKPGQSPRPLIYGTSVLATGVPVRFSGSGSGTDYTLTISRLEPEDFAVYYCQQWSSYPLYTFGGGTKVEIK

SEQ ID NO: 843 - protein, 109 aa, Artificial Sequence
  Description of Artificial Sequence: Synthetic polypeptide
  2G4[PD-L1]_L1.46
EIVLTQSPGTLSLSPGERATLSCRASSFIVLSNLHWYQQKPGQSPRPLIYGTSVLATGVPVRFSGSGSGTDYTLTISRLEPEDFAVYYCQQWSSYPLYTFGGGTKVEIK

SEQ ID NO: 844 - protein, 109 aa, Artificial Sequence
  Description of Artificial Sequence: Synthetic polypeptide
  2G4[PD-L1]_L1.47
EIVLTQSPGTLSLSPGERATLSCRASSRIVLSNLHWYQQKPGQSPRLLIYGTSVLATGVPVRFSGSGSGTDYTLTISRLEPEDFAVYYCQQWSSYPLYTFGGGTKVEIK

SEQ ID NO: 845 - protein, 109 aa, Artificial Sequence
  Description of Artificial Sequence: Synthetic polypeptide
  2G4[PD-L1]_L1.48
EIVLTQSPGTLSLSPGERATLSCRVSSFIQLSNLHWYQQKPGQSPRPLIYGTSVLATGVPVRFSGSGSGTDYTLTISRLEPEDFAVYYCQQWSSYPLYTFGGGTKVEIK

SEQ ID NO: 846 - protein, 109 aa, Artificial Sequence
  Description of Artificial Sequence: Synthetic polypeptide
  2G4[PD-L1]_L1.49
EIVLTQSPGTLSLSPGERATLSCRVSSRIQLSNLHWYQQKPGQSPRPLIYGTSVLATGVPVRFSGSGSGTDYTLTISRLEPEDFAVYYCQQWSSYPLYTFGGGTKVEIK

SEQ ID NO: 847 - protein, 109 aa, Artificial Sequence
  Description of Artificial Sequence: Synthetic polypeptide
  2G4[PD-L1]_L1.50
EIVLTQSPGTLSLSPGERATLSCRASSFIQLSNLHWYQQKPGQSPRPLIYGTSVLATGVPVRFSGSGSGTDYTLTISRLEPEDFAVYYCQQWSSYPLYTFGGGTKVEIK

SEQ ID NO: 848 - protein, 109 aa, Artificial Sequence
  Description of Artificial Sequence: Synthetic polypeptide
  2G4[PD-L1]_L1.51
EIVLTQSPGTLSLSPGERATLSCRASSRIQLSNLHWYQQKPGQSPRPLIYGTSVLATGVPVRFSGSGSGTDYTLTISRLEPEDFAVYYCQQWSSYPLYTFGGGTKVEIK

SEQ ID NO: 849 - protein, 109 aa, Artificial Sequence
  Description of Artificial Sequence: Synthetic polypeptide
  2G4[PD-L1]_L1.52
EIVLTQSPGTLSLSPGERATLSCRVSSFISRSNLHWYQQKPGQSPRPLIYGTSVLATGVPVRFSGSGSGTDYTLTISRLEPEDFAVYYCQQWSSYPLYTFGGGTKVEIK

SEQ ID NO: 850 - protein, 109 aa, Artificial Sequence
  Description of Artificial Sequence: Synthetic polypeptide
  2G4[PD-L1]_L1.53
EIVLTQSPGTLSLSPGERATLSCRVSSRISRSNLHWYQQKPGQSPRPLIYGTSVLATGVPVRFSGSGSGTDYTLTISRLEPEDFAVYYCQQWSSYPLYTFGGGTKVEIK

SEQ ID NO: 851 - protein, 109 aa, Artificial Sequence
  Description of Artificial Sequence: Synthetic polypeptide
  2G4[PD-L1]_L1.54
EIVLTQSPGTLSLSPGERATLSCRASSFISRSNLHWYQQKPGQSPRPLIYGTSVLATGVPVRFSGSGSGTDYTLTISRLEPEDFAVYYCQQWSSYPLYTFGGGTKVEIK

SEQ ID NO: 852 - protein, 109 aa, Artificial Sequence
  Description of Artificial Sequence: Synthetic polypeptide
  2G4[PD-L1]_L1.55
EIVLTQSPGTLSLSPGERATLSCRASSRISRSNLHWYQQKPGQSPRPLIYGTSVLATGVPVRFSGSGSGTDYTLTISRLEPEDFAVYYCQQWSSYPLYTFGGGTKVEIK

SEQ ID NO: 853 - protein, 109 aa, Artificial Sequence
  Description of Artificial Sequence: Synthetic polypeptide
  2G4[PD-L1]_L1.56
EIVLTQSPGTLSLSPGERATLSCRVSSFIQRSNLHWYQQKPGQSPRPLIYGTSVLATGVPVRFSGSGSGTDYTLTISRLEPEDFAVYYCQQWSSYPLYTFGGGTKVEIK

SEQ ID NO: 854 - protein, 109 aa, Artificial Sequence
  Description of Artificial Sequence: Synthetic polypeptide
  2G4[PD-L1]_L1.57
EIVLTQSPGTLSLSPGERATLSCRVSSRIQRSNLHWYQQKPGQSPRPLIYGTSVLATGVPVRFSGSGSGTDYTLTISRLEPEDFAVYYCQQWSSYPLYTFGGGTKVEIK

SEQ ID NO: 855 - protein, 109 aa, Artificial Sequence
  Description of Artificial Sequence: Synthetic polypeptide
  2G4[PD-L1]_L1.58
EIVLTQSPGTLSLSPGERATLSCRASSFIQRSNLHWYQQKPGQSPRPLIYGTSVLATGVPVRFSGSGSGTDYTLTISRLEPEDFAVYYCQQWSSYPLYTFGGGTKVEIK

SEQ ID NO: 856 - protein, 109 aa, Artificial Sequence
  Description of Artificial Sequence: Synthetic polypeptide
  2G4[PD-L1]_L1.59
EIVLTQSPGTLSLSPGERATLSCRASSRIQRSNLHWYQQKPGQSPRPLIYGTSVLATGVPVRFSGSGSGTDYTLTISRLEPEDFAVYYCQQWSSYPLYTFGGGTKVEIK

SEQ ID NO: 857 - protein, 109 aa, Artificial Sequence
  Description of Artificial Sequence: Synthetic polypeptide
  2G4[PD-L1]_L1.60
EIVLTQSPGTLSLSPGERATLSCRASSSISSSNLHWYQQKPGQSPRLLIYGTSNLASGVPVRFSGSGSGTDYTLTISRLEPEDFAVYYCQQWSSYPLWTFGGGTKVEIK

SEQ ID NO: 858 - protein, 109 aa, Artificial Sequence
  Description of Artificial Sequence: Synthetic polypeptide
  2G4[PD-L1]_L1.61
EIVLTQSPGTLSLSPGERATLSCRASLSIQSSNLHWYQQKPGQSPRLLIYGTNLLASGVPVRFSGSGSGTDYTLTISRLEPEDFAVYYCQQWSSYPLYTFGGGTKVEIK

SEQ ID NO: 859 - protein, 109 aa, Artificial Sequence
  Description of Artificial Sequence: Synthetic polypeptide
  2G4[PD-L1]_L1.62
EIVLTQSPGTLSLSPGERATLSCRASSSIQSTNLHWYQQKPGQSPRLLIYGTSVLATGVPVRFSGSGSGTDYTLTISRLEPEDFAVYYCQQWSSYPLYTFGGGTKVEIK

SEQ ID NO: 860 - protein, 109 aa, Artificial Sequence
  Description of Artificial Sequence: Synthetic polypeptide
  2G4[PD-L1]_L1.63
EIVLTQSPGTLSLSPGERATLSCRASSSISSSNLHWYQQKPGQSPRLLIYGTSNLASGVPVRFSGSGSGTDYTLTISRLEPEDFAVYYCQQWSSYPLYTFGGGTKVEIK

SEQ ID NO: 861 - protein, 109 aa, Artificial Sequence
  Description of Artificial Sequence: Synthetic polypeptide
  2G4[PD-L1]_L1.64
EIVLTQSPGTLSLSPGERATLSCRVSSSISSTNLHWYQQKPGQSPRPLIYGTSVLATGVPVRFSGSGSGTDYTLTISRLEPEDFAVYYCQQWSSYPLYTFGGGTKVEIK

SEQ ID NO: 862 - protein, 109 aa, Artificial Sequence
  Description of Artificial Sequence: Synthetic polypeptide
  2G4[PD-L1]_L1.65
EIVLTQSPGTLSLSPGERATLSCRVSSSIQSSNLHWYQQKPGQSPRPLIYGTSVLATGVPVRFSGSGSGTDYTLTISRLEPEDFAVYYCQQWSSYPLYTFGGGTKVEIK

SEQ ID NO: 863 - protein, 109 aa, Artificial Sequence
  Description of Artificial Sequence: Synthetic polypeptide
  2G4[PD-L1]_L1.66
EIVLTQSPGTLSLSPGERATLSCRVSSSIQSTNLHWYQQKPGQSPRPLIYGTSNLATGVPVRFSGSGSGTDYTLTISRLEPEDFAVYYCQQWSSYPLYTFGGGTKVEIK

SEQ ID NO: 864 - protein, 109 aa, Artificial Sequence
  Description of Artificial Sequence: Synthetic polypeptide
  2G4[PD-L1]_L1.67
EIVLTQSPGTLSLSPGERATLSCRVSSSIQSTNLHWYQQKPGQSPRPLIYGTSVLASGVPVRFSGSGSGTDYTLTISRLEPEDFAVYYCQQWSSYPLYTFGGGTKVEIK

SEQ ID NO: 865 - protein, 109 aa, Artificial Sequence
  Description of Artificial Sequence: Synthetic polypeptide
  2G4[PD-L1]_L1.68
EIVLTQSPGTLSLSPGERATLSCRVSSSIQSTNLHWYQQKPGQSPRPLIYGTSNLASGVPVRFSGSGSGTDYTLTISRLEPEDFAVYYCQQWSSYPLYTFGGGTKVEIK

SEQ ID NO: 866 - protein, 109 aa, Artificial Sequence
  Description of Artificial Sequence: Synthetic polypeptide
  2G4[PD-L1]_L1.69
EIVLTQSPGTLSLSPGERATLSCRVSSSISSSNLHWYQQKPGQSPRPLIYGTSVLATGVPVRFSGSGSGTDYTLTISRLEPEDFAVYYCQQWSSYPLYTFGGGTKVEIK

SEQ ID NO: 867 - protein, 109 aa, Artificial Sequence
  Description of Artificial Sequence: Synthetic polypeptide
  2G4[PD-L1]_L1.70
EIVLTQSPGTLSLSPGERATLSCRVSSSIQSTNLHWYQQKPGQSPRPLIYGTSSLATGVPVRFSGSGSGTDYTLTISRLEPEDFAVYYCQQWSSYPLYTFGGGTKVEIK

SEQ ID NO: 868 - protein, 109 aa, Artificial Sequence
  Description of Artificial Sequence: Synthetic polypeptide
  2G4[PD-L1]_L1.71
EIVLTQSPGTLSLSPGERATLSCRVSSSIQSTNLHWYQQKPGQSPRPLIYGTSTLATGVPVRFSGSGSGTDYTLTISRLEPEDFAVYYCQQWSSYPLYTFGGGTKVEIK

SEQ ID NO: 869 - protein, 220 aa, Homo sapiens
  sp|P10747|CD28_HUMAN T-cell-specific surface glycoprotein CD28 OS=Homo sapiens OX=9606 GN=CD28 PE=1 SV=1 Human CD28 sequence
MLRLLLALNLFPSIQVTGNKILVKQSPMLVAYDNAVNLSCKYSYNLFSREFRASLHKGLDSAVEVCVVYGNYSQQLQVYSKTGFNCDGKLGNESVTFYLQNLYVNQTDIYFCKIEVMYPPPYLDNEKSNGTIIHVKGKHLCPSPLFPGPSKPFWVLVVVGGVLACYSLLVTVAFIIFWVRSKRSRLLHSDYMNMTPRRPGPTRKHYQPYAPPRDFAAYRS

SEQ ID NO: 870 - protein, 134 aa, Homo sapiens
  sp|P10747|19-152 Human CD28, extracellular domain
NKILVKQSPMLVAYDNAVNLSCKYSYNLFSREFRASLHKGLDSAVEVCVVYGNYSQQLQVYSKTGFNCDGKLGNESVTFYLQNLYVNQTDIYFCKIEVMYPPPYLDNEKSNGTIIHVKGKHLCPSPLFPGPSKP

SEQ ID NO: 871 - protein, 218 aa, Mus musculus
  sp|P31041|CD28_MOUSE T-cell-specific surface glycoprotein CD28 OS=Mus musculus OX=10090 GN=Cd28 PE=1 SV=2 Mouse CD28 sequence
MTLRLLFLALNFFSVQVTENKILVKQSPLLVVDSNEVSLSCRYSYNLLAKEFRASLYKGVNSDVEVCVGNGNFTYQPQFRSNAEFNCDGDFDNETVTFRLWNLHVNHTDIYFCKIEFMYPPPYLDNERSNGTIIHIKEKHLCHTQSSPKLFWALVVVAGVLFCYGLLVTVALCVIWTNSRRNRLLQSDYMNMTPRRPGLTRKPYQPYAPARDFAAYRP

SEQ ID NO: 872 - protein, 131 aa, Mus musculus
  sp|P31041|20-150 Mouse CD28, extracellular domain
NKILVKQSPLLVVDSNEVSLSCRYSYNLLAKEFRASLYKGVNSDVEVCVGNGNFTYQPQFRSNAEFNCDGDFDNETVTFRLWNLHVNHTDIYFCKIEFMYPPPYLDNERSNGTIIHIKEKHLCHTQSSPKL

SEQ ID NO: 873 - protein, 220 aa, Macaca fascicularis
  tr|Q0PDN3|Q0PDN3_MACFA CD28 OS=Macaca fascicularis OX=9541 GN=CD 28 PE=2 SV=1 Cynomolgus CD28 sequence
MLRLLLALNLLPSIQVTGNKILVKQSPMLVAYDNAVNLSCKYSYNLFSREFRASLHKGLDSAVEVCVVYGNYSQQLQVYSKTGFNCDGKLGNESVTFYLQNLYVNQTDIYFCKIEVMYPPPYLDNEKSNGTIIHVKGKHLCPSPLFPGPSKPFWALVVVGGVLACYSLLVTVAFCIFWMRSKRSRLLHSDYMNMTPRRPGPTRKHYQPYAPPRDFAAYRS

SEQ ID NO: 874 - protein, 134 aa, Macaca fascicularis; identical to SEQ ID NO: 870
  tr|Q0PDN3|19-152 Cynomolgus CD28, extracellular domain

SEQ ID NO: 875 - protein, 584 aa, Macaca fascicularis
  XP_015308533.1 PREDICTED: CD276 antigen isoform X1 [Macaca fasci cularis] Cynomolgus CD28 sequence (predicted)
MKLSSDHVFPLFRKLQWLPAAFRIQFTPVSPSAGAAFHHGEPSCQLPHSKMLHRRGSPGMGVHVGAALGALWFCLTGALEVQVPEDPVVALVGTDATLRCSFSPEPGFSLAQLNLIWQLTDTKQLVHSFTEGRDQGSAYANRTALFLDLLAQGNASLRLQRVRVADEGSFTCFVSIRDFGSAAVSLQVAAPYSKPSMTLEPNKDLRPGDTVTITCSSYRGYPEAEVFWQDGQGAPLTGNVTTSQMANEQGLFDVHSVLRVVLGANGTYSCLVRNPVLQQDAHGSITITPQRSPTGAVEVQVPEDPVVALVGTDATLRCSFSPEPGFSLAQLNLIWQLTDTKQLVHSFTEGRDQGSAYANRTALFLDLLAQGNASLRLQRVRVADEGSFTCFVSIRDFGSAAVSLQVAAPYSKPSMTLEPNKDLRPGDTVTITCSSYRGYPEAEVFWQDGQGAPLTGNVTTSQMANEQGLFDVHSVLRVVLGANGTYSCLVRNPVLQQDAHGSVTITGQPMTFPPEALWVTVGLSVCLVALLVALAFVCWRKIKQSCEEENAGAEDQDGEGEGSKTALQPLKHSDSKEDDGQELA

SEQ ID NO: 876 - protein, 438 aa, Macaca fascicularis
  XP_015308533.1|79-516 Cynomolgus CD28, extracellular domain
LEVQVPEDPVVALVGTDATLRCSFSPEPGFSLAQLNLIWQLTDTKQLVHSFTEGRDQGSAYANRTALFLDLLAQGNASLRLQRVRVADEGSFTCFVSIRDFGSAAVSLQVAAPYSKPSMTLEPNKDLRPGDTVTITCSSYRGYPEAEVFWQDGQGAPLTGNVTTSQMANEQGLFDVHSVLRVVLGANGTYSCLVRNPVLQQDAHGSITITPQRSPTGAVEVQVPEDPVVALVGTDATLRCSFSPEPGFSLAQLNLIWQLTDTKQLVHSFTEGRDQGSAYANRTALFLDLLAQGNASLRLQRVRVADEGSFTCFVSIRDFGSAAVSLQVAAPYSKPSMTLEPNKDLRPGDTVTITCSSYRGYPEAEVFWQDGQGAPLTGNVTTSQMANEQGLFDVHSVLRVVLGANGTYSCLVRNPVLQQDAHGSVTITGQPMTFPPEA

SEQ ID NO: 877 - protein, 290 aa, Homo sapiens
  sp|Q9NZQ7 Human PDL1 sequence
MRIFAVFIFMTYWHLLNAFTVTVPKDLYVVEYGSNMTIECKFPVEKQLDLAALIVYWEMEDKNIIQFVHGEEDLKVQHSSYRQRARLLKDQLSLGNAALQITDVKLQDAGVYRCMISYGGADYKRITVKVNAPYNKINQRILVVDPVTSEHELTCQAEGYPKAEVIWTSSDHQVLSGKTTTTNSKREEKLFNVTSTLRINTTTNEIFYCTFRRLDPEENHTAELVIPELPLAHPPNERTHLVILGAILLCLGVALTFIFRLRKGRMMDVKKCGIQDTNSKKQSDTHLEET

SEQ ID NO: 878 - protein, 220 aa, Homo sapiens
  sp|Q9NZQ7|19-238 Human PDL1, extracellular domain
FTVTVPKDLYVVEYGSNMTIECKFPVEKQLDLAALIVYWEMEDKNIIQFVHGEEDLKVQHSSYRQRARLLKDQLSLGNAALQITDVKLQDAGVYRCMISYGGADYKRITVKVNAPYNKINQRILVVDPVTSEHELTCQAEGYPKAEVIWTSSDHQVLSGKTTTTNSKREEKLFNVTSTLRINTTTNEIFYCTFRRLDPEENHTAELVIPELPLAHPPNER

SEQ ID NO: 879 - protein, 290 aa, Mus musculus
  sp|Q9EP73 Mouse PDL1 sequence
MRIFAGIIFTACCHLLRAFTITAPKDLYVVEYGSNVTMECRFPVERELDLLALVVYWEKEDEQVIQFVAGEEDLKPQHSNFRGRASLPKDQLLKGNAALQITDVKLQDAGVYCCIISYGGADYKRITLKVNAPYRKINQRISVDPATSEHELICQAEGYPEAEVIWTNSDHQPVSGKRSVTTSRTEGMLLNVTSSLRVNATANDVFYCTFWRSQPGQNHTAELIIPELPATHPPQNRTHWVLLGSILLFLIVVSTVLLFLRKQVRMLDVEKCGVEDTSSKNRNDTQFEET

SEQ ID NO: 880 - protein, 221 aa, Mus musculus
  sp|Q9EP73|19-239 Mouse PDL1, extracellular domain
FTITAPKDLYVVEYGSNVTMECRFPVERELDLLALVVYWEKEDEQVIQFVAGEEDLKPQHSNFRGRASLPKDQLLKGNAALQITDVKLQDAGVYCCIISYGGADYKRITLKVNAPYRKINQRISVDPATSEHELICQAEGYPEAEVIWTNSDHQPVSGKRSVTTSRTEGMLLNVTSSLRVNATANDVFYCTFWRSQPGQNHTAELIIPELPATHPPQNRTH

SEQ ID NO: 881 - protein, 290 aa, Macaca fascicularis
  tr|G7PSE7 Cynomolgus PDL1 sequence
MRIFAVFIFTIYWHLLNAFTVTVPKDLYVVEYGSNMTIECKFPVEKQLDLTSLIVYWEMEDKNIIQFVHGEEDLKVQHSNYRQRAQLLKDQLSLGNAALRITDVKLQDAGVYRCMISYGGADYKRITVKVNAPYNKINQRILVVDPVTSEHELTCQAEGYPKAEVIWTSSDHQVLSGKTTTTNSKREEKLLNVTSTLRINTTANEIFYCIFRRLDPEENHTAELVIPELPLALPPNERTHLVILGAIFLLLGVALTFIFYLRKGRMMDMKKCGIRVTNSKKQRDTQLEET

SEQ ID NO: 882 - protein, 220 aa, Macaca fascicularis
  tr|G7PSE7|19-238 Cynomolgus PDL1, extracellular domain
FTVTVPKDLYVVEYGSNMTIECKFPVEKQLDLTSLIVYWEMEDKNIIQFVHGEEDLKVQHSNYRQRAQLLKDQLSLGNAALRITDVKLQDAGVYRCMISYGGADYKRITVKVNAPYNKINQRILVVDPVTSEHELTCQAEGYPKAEVIWTSSDHQVLSGKTTTTNSKREEKLLNVTSTLRINTTANEIFYCIFRRLDPEENHTAELVIPELPLALPPNER

SEQ ID NO: 883 - protein, 15 aa, Artificial Sequence
  Description of Artificial Sequence: Synthetic peptide
GGGGSGGGGSGGGGS

SEQ ID NO: 884 - protein, 18 aa, Artificial Sequence
  Description of Artificial Sequence: Synthetic peptide
GSTSGSGKPGSGEGSTKG

SEQ ID NO: 885 - protein, 14 aa, Artificial Sequence
  Description of Artificial Sequence: Synthetic peptide
IRPRAIGGSKPRVA

SEQ ID NO: 886 - protein, 15 aa, Artificial Sequence
  Description of Artificial Sequence: Synthetic peptide
GKGGSGKGGSGKGGS

SEQ ID NO: 887 - protein, 15 aa, Artificial Sequence
  Description of Artificial Sequence: Synthetic peptide
GGKGSGGKGSGGKGS

SEQ ID NO: 888 - protein, 15 aa, Artificial Sequence
  Description of Artificial Sequence: Synthetic peptide
GGGKSGGGKSGGGKS

SEQ ID NO: 889 - protein, 15 aa, Artificial Sequence
  Description of Artificial Sequence: Synthetic peptide
GKGKSGKGKSGKGKS

SEQ ID NO: 890 - protein, 15 aa, Artificial Sequence
  Description of Artificial Sequence: Synthetic peptide
GGGKSGGKGSGKGGS

SEQ ID NO: 891 - protein, 15 aa, Artificial Sequence
  Description of Artificial Sequence: Synthetic peptide
GKPGSGKPGSGKPGS

SEQ ID NO: 892 - protein, 20 aa, Artificial Sequence
  Description of Artificial Sequence: Synthetic peptide
GKPGSGKPGSGKPGSGKPGS

SEQ ID NO: 893 - protein, 20 aa, Artificial Sequence
  Description of Artificial Sequence: Synthetic peptide
GKGKSGKGKSGKGKSGKGKS

SEQ ID NO: 894 - protein, 20 aa, Artificial Sequence
  Description of Artificial Sequence: Synthetic peptide
GGGGSGGGGSGGGGSGGGGS

SEQ ID NO: 895 - protein, 14 aa, Artificial Sequence
  Description of Artificial Sequence: Synthetic peptide
STAGDTHLGGEDFD

SEQ ID NO: 896 - protein, 15 aa, Artificial Sequence
  Description of Artificial Sequence: Synthetic peptide
GEGGSGEGGSGEGGS

SEQ ID NO: 897 - protein, 15 aa, Artificial Sequence
  Description of Artificial Sequence: Synthetic peptide
GGEGSGGEGSGGEGS

SEQ ID NO: 898 - protein, 15 aa, Artificial Sequence
  Description of Artificial Sequence: Synthetic peptide
GGGESGGGESGGGES

SEQ ID NO: 899 - protein, 15 aa, Artificial Sequence
  Description of Artificial Sequence: Synthetic peptide
GEGESGEGESGEGES

SEQ ID NO: 900 - protein, 15 aa, Artificial Sequence
  Description of Artificial Sequence: Synthetic peptide
GGGESGGEGSGEGGS

SEQ ID NO: 901 - protein, 20 aa, Artificial Sequence
  Description of Artificial Sequence: Synthetic peptide
GEGESGEGESGEGESGEGES

SEQ ID NO: 902 - protein, 15 aa, Artificial Sequence
  Description of Artificial Sequence: Synthetic peptide
GGGGSGGGGSGGGGS

SEQ ID NO: 903 - protein, 20 aa, Artificial Sequence
  Description of Artificial Sequence: Synthetic peptide
GGGGSGGGGSGGGGSGGGGS

SEQ ID NO: 904 - protein, 18 aa, Artificial Sequence
  Description of Artificial Sequence: Synthetic peptide
GSTSGSGKPGSGEGSTKG

SEQ ID NO: 905 - protein, 19 aa, Artificial Sequence
  Description of Artificial Sequence: Synthetic peptide
PRGASKSGSASQTGSAPGS

SEQ ID NO: 906 - protein, 19 aa, Artificial Sequence
  Description of Artificial Sequence: Synthetic peptide
GTAAAGAGAAGGAAAGAAG

SEQ ID NO: 907 - protein, 19 aa, Artificial Sequence
  Description of Artificial Sequence: Synthetic peptide
GTSGSSGSGSGGSGSGGGG

SEQ ID NO: 908 - protein, 20 aa, Artificial Sequence
  Description of Artificial Sequence: Synthetic peptide
GKPGSGKPGSGKPGSGKPGS

SEQ ID NO: 909 - protein, 5 aa, Artificial Sequence
  Description of Artificial Sequence: Synthetic peptide
GGGGS

SEQ ID NO: 910 - protein, 10 aa, Artificial Sequence
  Description of Artificial Sequence: Synthetic peptide
GGGGSGGGGS

SEQ ID NO: 911 - protein, 15 aa, Artificial Sequence
  Description of Artificial Sequence: Synthetic peptide
GGGGSGGGGSGGGGS

SEQ ID NO: 912 - protein, 20 aa, Artificial Sequence
  Description of Artificial Sequence: Synthetic peptide
GGGGSGGGGSGGGGSGGGGS

SEQ ID NO: 913 - protein, 25 aa, Artificial Sequence
  Description of Artificial Sequence: Synthetic peptide
GGGGSGGGGSGGGGSGGGGSGGGGS

SEQ ID NO: 914 - protein, 30 aa, Artificial Sequence
  Description of Artificial Sequence: Synthetic polypeptide
GGGGSGGGGSGGGGSGGGGSGGGGSGGGGS

SEQ ID NO: 915 - protein, 35 aa, Artificial Sequence
  Description of Artificial Sequence: Synthetic polypeptide
GGGGSGGGGSGGGGSGGGGSGGGGSGGGGSGGGGS

SEQ ID NO: 916 - protein, 5 aa, Artificial Sequence
  Description of Artificial Sequence: Synthetic peptide
GGGGA

SEQ ID NO: 917 - protein, 10 aa, Artificial Sequence
  Description of Artificial Sequence: Synthetic peptide
GGGGAGGGGA

SEQ ID NO: 918 - protein, 15 aa, Artificial Sequence
  Description of Artificial Sequence: Synthetic peptide
GGGGAGGGGAGGGGA

SEQ ID NO: 919 - protein, 20 aa, Artificial Sequence
  Description of Artificial Sequence: Synthetic peptide
GGGGAGGGGAGGGGAGGGGA

SEQ ID NO: 920 - protein, 25 aa, Artificial Sequence
  Description of Artificial Sequence: Synthetic peptide
GGGGAGGGGAGGGGAGGGGAGGGGA

SEQ ID NO: 921 - protein, 30 aa, Artificial Sequence
  Description of Artificial Sequence: Synthetic polypeptide
GGGGAGGGGAGGGGAGGGGAGGGGAGGGGA

SEQ ID NO: 922 - protein, 35 aa, Artificial Sequence
  Description of Artificial Sequence: Synthetic polypeptide
GGGGAGGGGAGGGGAGGGGAGGGGAGGGGAGGGGA

SEQ ID NO: 923 - protein, 30 aa, Artificial Sequence
  Description of Artificial Sequence: Synthetic polypeptide
DPALVHQRPAPPGGGGSGGGGSGGGGSGGG

SEQ ID NO: 924 - protein, 5 aa, Artificial Sequence
  Description of Artificial Sequence: Synthetic peptide
GKPGS

SEQ ID NO: 925 - protein, 25 aa, Artificial Sequence
  Description of Artificial Sequence: Synthetic peptide
GKPGSGKPGSGKPGSGKPGSGKPGS

SEQ ID NO: 926 - protein, 30 aa, Artificial Sequence
  Description of Artificial Sequence: Synthetic polypeptide
GKPGSGKPGSGKPGSGKPGSGKPGSGKPGS

SEQ ID NO: 927 - protein, 5 aa, Artificial Sequence
  Description of Artificial Sequence: Synthetic peptide
GGGES

SEQ ID NO: 928 - protein, 9 aa, Artificial Sequence
  Description of Artificial Sequence: Synthetic peptide
KTHTCPPCP

SEQ ID NO: 929 - protein, 15 aa, Artificial Sequence
  Description of Artificial Sequence: Synthetic peptide
EPKSSDKTHTCPPCP

SEQ ID NO: 930 - protein, 19 aa, Artificial Sequence
  Description of Artificial Sequence: Synthetic peptide
GGGGSGGGGSKTHTCPPCP

SEQ ID NO: 931 - protein, 19 aa, Artificial Sequence
  Description of Artificial Sequence: Synthetic peptide
GKPGSGKPGSKTHTCPPCP

SEQ ID NO: 932 - protein, 14 aa, Artificial Sequence
  Description of Artificial Sequence: Synthetic peptide
GKPGSKTHTCPPCP

SEQ ID NO: 933 - protein, 5 aa, Artificial Sequence
  Description of Artificial Sequence: Synthetic peptide
EPKSC

SEQ ID NO: 934 - protein, 15 aa, Artificial Sequence
  Description of Artificial Sequence: Synthetic peptide
EPKSCGGGGSGGGGS

SEQ ID NO: 935 - protein, 15 aa, Artificial Sequence
  Description of Artificial Sequence: Synthetic peptide
EPKSCGKPGSGKPGS

SEQ ID NO: 936 - protein, 10 aa, Artificial Sequence
  Description of Artificial Sequence: Synthetic peptide
EPKSCGKPGS

SEQ ID NO: 937 - protein, 216 aa, Artificial Sequence
  Description of Artificial Sequence: Synthetic polypeptide
  Heterodimeric Fc Backbone 1 monomer 1 (-)
APPVAGPSVFLFPPKPKDTLMISRTPEVTCVVVDVKHEDPEVKFNWYVDGVEVHNAKTKPREEEYNSTYRVVSVLTVLHQDWLNGKEYKCKVSNKALPAPIEKTISKAKGQPREPQVYTLPPSREEMTKNQVSLTCDVSGFYPSDIAVEWESDGQPENNYKTTPPVLDSDGSFFLYSKLTVDKSRWEQGDVFSCSVMHEALHNHYTQKSLSLSPGK

SEQ ID NO: 938 - protein, 216 aa, Artificial Sequence
  Description of Artificial Sequence: Synthetic polypeptide
  Heterodimeric Fc Backbone 1 monomer 2 (+)
APPVAGPSVFLFPPKPKDTLMISRTPEVTCVVVDVKHEDPEVKFNWYVDGVEVHNAKTKPREEQYNSTYRVVSVLTVLHQDWLNGKEYKCKVSNKALPAPIEKTISKAKGQPREPQVYTLPPSREQMTKNQVKLTCLVKGFYPSDIAVEWESNGQPENNYKTTPPVLDSDGSFFLYSKLTVDKSRWQQGNVFSCSVMHEALHNHYTQKSLSLSPGK

SEQ ID NO: 939 - protein, 216 aa, Artificial Sequence; identical to SEQ ID NO: 937
  Description of Artificial Sequence: Synthetic polypeptide
  Heterodimeric Fc Backbone 2 monomer 1 (-)

SEQ ID NO: 940 - protein, 216 aa, Artificial Sequence
  Description of Artificial Sequence: Synthetic polypeptide
  Heterodimeric Fc Backbone monomer 2 (+)
APPVAGPSVFLFPPKPKDTLMISRTPEVTCVVVDVKHEDPEVKFNWYVDGVEVHNAKTKPREEQYNSTYRVVSVLTVLHQDWLNGKEYKCKVSNKALPAPIEKTISKAKGQPREPQVYTLPPSREEMTKNQVKLTCLVKGFYPSDIAVEWESNGQPENNYKTTPPVLDSDGSFFLYSKLTVDKSRWQQGNVFSCSVMHEALHNHYTQKSLSLSPGK

SEQ ID NO: 941 - protein, 216 aa, Artificial Sequence
  Description of Artificial Sequence: Synthetic polypeptide
  Heterodimeric Fc Backbone 3 monomer 1 (-)
APPVAGPSVFLFPPKPKDTLMISRTPEVTCVVVDVKHEDPEVKFNWYVDGVEVHNAKTKPREEEYNSTYRVVSVLTVLHQDWLNGKEYKCKVSNKALPAPIEKTISKAKGQPREPQVYTLPPSREEMTKNQVSLTCEVSGFYPSDIAVEWESDGQPENNYKTTPPVLDSDGSFFLYSKLTVDKSRWEQGDVFSCSVMHEALHNHYTQKSLSLSPGK

SEQ ID NO: 942 - protein, 216 aa, Artificial Sequence; identical to SEQ ID NO: 940
  Description of Artificial Sequence: Synthetic polypeptide
  Heterodimeric Fc Backbone 3 monomer 2 (+)

SEQ ID NO: 943 - protein, 216 aa, Artificial Sequence
  Description of Artificial Sequence: Synthetic polypeptide
  Heterodimeric Fc Backbone 4 monomer 1 (-)
APPVAGPSVFLFPPKPKDTLMISRTPEVTCVVVDVKHEDPEVKFNWYVDGVEVHNAKTKPREEEYNSTYRVVSVLTVLHQDWLNGKEYKCKVSNKALPAPIEKTISKAKGQPREPQVYTLPPSREEMTENEVSLTCLVKGFYPSDIAVEWESDGQPENNYKTTPPVLDSDGSFFLYSKLEVDKSRWEQGDVFSCSVMHEALHNHYTQKSLSLSPGK

SEQ ID NO: 944 - protein, 216 aa, Artificial Sequence
  Description of Artificial Sequence: Synthetic polypeptide
  Heterodimeric Fc Backbone 4 monomer 2 (+)
APPVAGPSVFLFPPKPKDTLMISRTPEVTCVVVDVKHEDPEVKFNWYVDGVEVHNAKTKPREEQYNSTYRVVSVLTVLHQDWLNGKEYKCKVSNKALPAPIEKTISKAKGQPREPQVYTLPPSREEMTKNQVSLTCLVKGFYPSDIAVEWESNGQPENNYKTTPPVLDSKGSFFLYSKLTVDKSRWQQGNVFSCSVMHEALHNHYTQKSLSLSPGK

SEQ ID NO: 945 - protein, 216 aa, Artificial Sequence
  Description of Artificial Sequence: Synthetic polypeptide
  Heterodimeric Fc Backbone 5 monomer 1 (-)
APPVAGPSVFLFPPKPKDTLMISRTPEVTCVVVDVKHEDPEVKFNWYVDGVEVHNAKTKPREEEYNSTYRVVSVLTVLHQDWLNGKEYKCKVSNKALPAPIEKTISKAKGQPREPQVYTLPPSRDELTKNQVSLTCDVSGFYPSDIAVEWESDGQPENNYKTTPPVLDSDGSFFLYSKLTVDKSRWEQGDVFSCSVMHEALHNHYTQKSLSLSPGK

SEQ ID NO: 946 - protein, 216 aa, Artificial Sequence
  Description of Artificial Sequence: Synthetic polypeptide
  Heterodimeric Fc Backbone 5 monomer 2 (+)
APPVAGPSVFLFPPKPKDTLMISRTPEVTCVVVDVKHEDPEVKFNWYVDGVEVHNAKTKPREEQYNSTYRVVSVLTVLHQDWLNGKEYKCKVSNKALPAPIEKTISKAKGQPREPQVYTLPPSRDQLTKNQVKLTCLVKGFYPSDIAVEWESNGQPENNYKTTPPVLDSDGSFFLYSKLTVDKSRWQQGNVFSCSVMHEALHNHYTQKSLSLSPGK

SEQ ID NO: 947 - protein, 216 aa, Artificial Sequence
  Description of Artificial Sequence: Synthetic polypeptide
  Heterodimeric Fc Backbone 6 monomer 1 (-)
APPVAGPSVFLFPPKPKDTLMISRTPEVTCVVVDVKHEDPEVKFNWYVDGVEVHNAKTKPREEEYASTYRVVSVLTVLHQDWLNGKEYKCKVSNKALPAPIEKTISKAKGQPREPQVYTLPPSREEMTKNQVSLTCDVSGFYPSDIAVEWESDGQPENNYKTTPPVLDSDGSFFLYSKLTVDKSRWEQGDVFSCSVMHEALHNHYTQKSLSLSPGK

SEQ ID NO: 948 - protein, 216 aa, Artificial Sequence
  Description of Artificial Sequence: Synthetic polypeptide
  Heterodimeric Fc Backbone 6 monomer 2 (+)
APPVAGPSVFLFPPKPKDTLMISRTPEVTCVVVDVKHEDPEVKFNWYVDGVEVHNAKTKPREEQYASTYRVVSVLTVLHQDWLNGKEYKCKVSNKALPAPIEKTISKAKGQPREPQVYTLPPSREQMTKNQVKLTCLVKGFYPSDIAVEWESNGQPENNYKTTPPVLDSDGSFFLYSKLTVDKSRWQQGNVFSCSVMHEALHNHYTQKSLSLSPGK

SEQ ID NO: 949 - protein, 216 aa, Artificial Sequence
  Description of Artificial Sequence: Synthetic polypeptide
  Heterodimeric Fc Backbone 7 monomer 1 (-)
APPVAGPSVFLFPPKPKDTLMISRTPEVTCVVVDVKHEDPEVKFNWYVDGVEVHNAKTKPREEEYSSTYRVVSVLTVLHQDWLNGKEYKCKVSNKALPAPIEKTISKAKGQPREPQVYTLPPSREEMTKNQVSLTCDVSGFYPSDIAVEWESDGQPENNYKTTPPVLDSDGSFFLYSKLTVDKSRWEQGDVFSCSVMHEALHNHYTQKSLSLSPGK

SEQ ID NO: 950 - protein, 216 aa, Artificial Sequence
  Description of Artificial Sequence: Synthetic polypeptide
  Heterodimeric Fc Backbone 7 monomer 2 (+)
APPVAGPSVFLFPPKPKDTLMISRTPEVTCVVVDVKHEDPEVKFNWYVDGVEVHNAKTKPREEQYSSTYRVVSVLTVLHQDWLNGKEYKCKVSNKALPAPIEKTISKAKGQPREPQVYTLPPSREQMTKNQVKLTCLVKGFYPSDIAVEWESNGQPENNYKTTPPVLDSDGSFFLYSKLTVDKSRWQQGNVFSCSVMHEALHNHYTQKSLSLSPGK

SEQ ID NO: 951 - protein, 217 aa, Artificial Sequence
  Description of Artificial Sequence: Synthetic polypeptide
  Heterodimeric Fc Backbone 8 monomer 1 (-)
APEFLGGPSVFLFPPKPKDTLMISRTPEVTCVVVDVSQEDPEVQFNWYVDGVEVHNAKTKPREEEFNSTYRVVSVLTVLHQDWLNGKEYKCKVSNKGLPSSIEKTISKAKGQPREPQVYTLPPSQEEMTKNQVSLTCDVSGFYPSDIAVEWESDGQPENNYKTTPPVLDSDGSFFLYSRLTVDKSRWEEGDVFSCSVMHEALHNHYTQKSLSLSLGK

SEQ ID NO: 952 - protein, 217 aa, Artificial Sequence
  Description of Artificial Sequence: Synthetic polypeptide
  Heterodimeric Fc Backbone 8 monomer 2 (+)
APEFLGGPSVFLFPPKPKDTLMISRTPEVTCVVVDVSQEDPEVQFNWYVDGVEVHNAKTKPREEQFNSTYRVVSVLTVLHQDWLNGKEYKCKVSNKGLPSSIEKTISKAKGQPREPQVYTLPPSQEQMTKNQVKLTCLVKGFYPSDIAVEWESNGQPENNYKTTPPVLDSDGSFFLYSRLTVDKSRWQEGNVFSCSVMHEALHNHYTQKSLSLSLGK

SEQ ID NO: 953 - protein, 216 aa, Artificial Sequence
  Description of Artificial Sequence: Synthetic polypeptide
  Heterodimeric Fc Backbone 9 monomer 1 (-)
APPVAGPSVFLFPPKPKDTLMISRTPEVTCVVVDVSHEDPEVQFNWYVDGVEVHNAKTKPREEEFNSTFRVVSVLTVVHQDWLNGKEYKCKVSNKGLPAPIEKTISKTKGQPREPQVYTLPPSREEMTKNQVSLTCDVSGFYPSDIAVEWESDGQPENNYKTTPPMLDSDGSFFLYSKLTVDKSRWEQGDVFSCSVMHEALHNHYTQKSLSLSPGK

SEQ ID NO: 954 - protein, 216 aa, Artificial Sequence
  Description of Artificial Sequence: Synthetic polypeptide
  Heterodimeric Fc Backbone 9 monomer 2 (+)
APPVAGPSVFLFPPKPKDTLMISRTPEVTCVVVDVSHEDPEVQFNWYVDGVEVHNAKTKPREEQFNSTFRVVSVLTVVHQDWLNGKEYKCKVSNKGLPAPIEKTISKTKGQPREPQVYTLPPSREQMTKNQVKLTCLVKGFYPSDIAVEWESNGQPENNYKTTPPMLDSDGSFFLYSKLTVDKSRWQQGNVFSCSVMHEALHNHYTQKSLSLSPGK

SEQ ID NO: 955 - protein, 216 aa, Artificial Sequence
  Description of Artificial Sequence: Synthetic polypeptide
  Heterodimeric Fc Backbone 10 monomer 1 (-)
APPVAGPSVFLFPPKPKDTLMISRTPEVTCVVVDVKHEDPEVQFNWYVDGVEVHNAKTKPREEEFNSTFRVVSVLTVVHQDWLNGKEYKCKVSNKGLPAPIEKTISKTKGQPREPQVYTLPPSREEMTKNQVSLTCDVSGFYPSDIAVEWESDGQPENNYKTTPPMLDSDGSFFLYSKLTVDKSRWEQGDVFSCSVMHEALHNHYTQKSLSLSPGK

SEQ ID NO: 956 - protein, 216 aa, Artificial Sequence
  Description of Artificial Sequence: Synthetic polypeptide
  Heterodimeric Fc Backbone 10 monomer 2 (+)
APPVAGPSVFLFPPKPKDTLMISRTPEVTCVVVDVKHEDPEVQFNWYVDGVEVHNAKTKPREEQFNSTFRVVSVLTVVHQDWLNGKEYKCKVSNKGLPAPIEKTISKTKGQPREPQVYTLPPSREQMTKNQVKLTCLVKGFYPSDIAVEWESNGQPENNYKTTPPMLDSDGSFFLYSKLTVDKSRWQQGNVFSCSVMHEALHNHYTQKSLSLSPGK

SEQ ID NO: 957 - protein, 216 aa, Artificial Sequence
  Description of Artificial Sequence: Synthetic polypeptide
  Heterodimeric Fc Backbone 11 monomer 1 (-)
APPVAGPSVFLFPPKPKDTLMISRTPEVTCVVVDVKHEDPEVKFNWYVDGVEVHNAKTKPREEEYNSTYRVVSVLTVLHQDWLNGKEYKCKVSNKALPAPIEKTISKAKGQPREPQVYTLPPSREEMTKNQVSLTCDVSGFYPSDIAVEWESDGQPENNYKTTPPVLDSDGSFFLYSKLTVDKSRWEQGDVFSCSVLHEALHSHYTQKSLSLSPGK

SEQ ID NO: 958 - protein, 216 aa, Artificial Sequence
  Description of Artificial Sequence: Synthetic polypeptide
  Heterodimeric Fc Backbone 11 monomer 2 (+)
APPVAGPSVFLFPPKPKDTLMISRTPEVTCVVVDVKHEDPEVKFNWYVDGVEVHNAKTKPREEQYNSTYRVVSVLTVLHQDWLNGKEYKCKVSNKALPAPIEKTISKAKGQPREPQVYTLPPSREQMTKNQVKLTCLVKGFYPSDIAVEWESNGQPENNYKTTPPVLDSDGSFFLYSKLTVDKSRWQQGNVFSCSVLHEALHSHYTQKSLSLSPGK

SEQ ID NO: 959 - protein, 216 aa, Artificial Sequence
  Description of Artificial Sequence: Synthetic polypeptide
  Heterodimeric Fc Backbone 12 monomer 1 (-)
APPVAGPSVFLFPPKPKDTLMISRTPEVTCVVVDVKHEDPEVKFKWYVDGVEVHNAKTKPREEQYNSTYRVVSVLTVLHQDWLNGKEYKCKVSNKALPAPIEKTISKAKGQPREPQVYTLPPSREQMTKNQVKLTCLVKGFYPSDIAVEWESNGQPENNYKTTPPVLDSDGSFFLYSKLTVDKSRWQQGNVFSCSVMHEALHNHYTQKSLSLSPGK

SEQ ID NO: 960 - protein, 216 aa, Artificial Sequence; identical to SEQ ID NO: 937
  Description of Artificial Sequence: Synthetic polypeptide
  Heterodimeric Fc Backbone 12 monomer 2 (+)

SEQ ID NO: 961 - protein, 216 aa, Artificial Sequence; identical to SEQ ID NO: 937
  Description of Artificial Sequence: Synthetic polypeptide
  2 + 1 mAb-scFv Heterodimeric Fc Backbone monomer 1 (-)

SEQ ID NO: 962 - protein, 215 aa, Artificial Sequence
  Description of Artificial Sequence: Synthetic polypeptide
  2 + 1 mAb-scFv Heterodimeric Fc Backbone monomer 2 (+)
APPVAGPSVFLFPPKPKDTLMISRTPEVTCVVVDVKHEDPEVKFNWYVDGVEVHNAKTKPREEQYNSTYRVVSVLTVLHQDWLNGKEYKCKVSNKALPAPIEKTISKAKGQPREPQVYTLPPSREQMTKNQVKLTCLVKGFYPSDIAVEWESNGQPENNYKTTPPVLDSDGSFFLYSKLTVDKSRWQQGNVFSCSVMHEALHNHYTQKSLSLSPG

SEQ ID NO: 963 - protein, 113 aa, Artificial Sequence
  Description of Artificial Sequence: Synthetic polypeptide
  IgG1 CH1(+) + hinge
ASTKGPSVFPLAPSSKSTSGGTAALGCLVKDYFPEPVTVSWNSGALTSGVHTFPAVLQSSGLYSLSSVVTVPSSSLGTQTYICNVNHKPSNTKVDKKVEPKSCDKTHTCPPCP

SEQ ID NO: 964 - protein, 113 aa, Artificial Sequence
  Description of Artificial Sequence: Synthetic polypeptide
  IgG1 CH1(-) + hinge
ASTKGPSVFPLAPSSKSTSGGTAALGCLVKDYFPEPVTVSWNSGALTSGVHTFPAVLQSSGLYSLSSVVTVPSSSLGTQTYICNVNHKPSDTKVDKKVEPKSCDKTHTCPPCP

SEQ ID NO: 965 - protein, 110 aa, Artificial Sequence
  Description of Artificial Sequence: Synthetic polypeptide
  IgG2 CH1(+) + hinge
ASTKGPSVFPLAPCSRSTSESTAALGCLVKDYFPEPVTVSWNSGALTSGVHTFPAVLQSSGLYSLSSVVTVPSSNFGTQTYTCNVDHKPSNTKVDKTVERKCCVECPPCP

SEQ ID NO: 966 - protein, 110 aa, Artificial Sequence
  Description of Artificial Sequence: Synthetic polypeptide
  IgG2 CH1(-) + hinge
ASTKGPSVFPLAPCSRSTSESTAALGCLVKDYFPEPVTVSWNSGALTSGVHTFPAVLQSSGLYSLSSVVTVPSSNFGTQTYTCNVDHKPSDTKVDKTVERKCCVECPPCP

SEQ ID NO: 967 - protein, 110 aa, Artificial Sequence
  Description of Artificial Sequence: Synthetic polypeptide
  IgG4 CH1(+) + hinge
ASTKGPSVFPLAPCSRSTSESTAALGCLVKDYFPEPVTVSWNSGALTSGVHTFPAVLQSSGLYSLSSVVTVPSSSLGTKTYTCNVDHKPSNTKVDKRVESKYGPPCPSCP

SEQ ID NO: 968 - protein, 110 aa, Artificial Sequence
  Description of Artificial Sequence: Synthetic polypeptide
  IgG4 CH1(-) + hinge
ASTKGPSVFPLAPCSRSTSESTAALGCLVKDYFPEPVTVSWNSGALTSGVHTFPAVLQSSGLYSLSSVVTVPSSSLGTKTYTCNVDHKPSDTKVDKRVESKYGPPCPSCP

SEQ ID NO: 969 - protein, 103 aa, Artificial Sequence
  Description of Artificial Sequence: Synthetic polypeptide
  IgG1 CH1(+) + half hinge
ASTKGPSVFPLAPSSKSTSGGTAALGCLVKDYFPEPVTVSWNSGALTSGVHTFPAVLQSSGLYSLSSVVTVPSSSLGTQTYICNVNHKPSNTKVDKKVEPKSC

SEQ ID NO: 970 - protein, 103 aa, Artificial Sequence
  Description of Artificial Sequence: Synthetic polypeptide
  IgG1 CH1(-) + half hinge
ASTKGPSVFPLAPSSKSTSGGTAALGCLVKDYFPEPVTVSWNSGALTSGVHTFPAVLQSSGLYSLSSVVTVPSSSLGTQTYICNVNHKPSDTKVDKKVEPKSC

SEQ ID NO: 971 - protein, 98 aa, Artificial Sequence
  Description of Artificial Sequence: Synthetic polypeptide
  IgG1 CH1(+)
ASTKGPSVFPLAPSSKSTSGGTAALGCLVKDYFPEPVTVSWNSGALTSGVHTFPAVLQSSGLYSLSSVVTVPSSSLGTQTYICNVNHKPSNTKVDKKV

SEQ ID NO: 972 - protein, 98 aa, Artificial Sequence
  Description of Artificial Sequence: Synthetic polypeptide
  IgG1 CH1(-)
ASTKGPSVFPLAPSSKSTSGGTAALGCLVKDYFPEPVTVSWNSGALTSGVHTFPAVLQSSGLYSLSSVVTVPSSSLGTQTYICNVNHKPSDTKVDKKV

SEQ ID NO: 973 - protein, 98 aa, Artificial Sequence
  Description of Artificial Sequence: Synthetic polypeptide
  IgG2 CH1(+)
ASTKGPSVFPLAPCSRSTSESTAALGCLVKDYFPEPVTVSWNSGALTSGVHTFPAVLQSSGLYSLSSVVTVPSSNFGTQTYTCNVDHKPSNTKVDKTV

SEQ ID NO: 974 - protein, 98 aa, Artificial Sequence
  Description of Artificial Sequence: Synthetic polypeptide
  IgG2 CH1(-)
ASTKGPSVFPLAPCSRSTSESTAALGCLVKDYFPEPVTVSWNSGALTSGVHTFPAVLQSSGLYSLSSVVTVPSSNFGTQTYTCNVDHKPSDTKVDKTV

SEQ ID NO: 975 - protein, 98 aa, Artificial Sequence
  Description of Artificial Sequence: Synthetic polypeptide
  IgG4 CH1(+)
ASTKGPSVFPLAPCSRSTSESTAALGCLVKDYFPEPVTVSWNSGALTSGVHTFPAVLQSSGLYSLSSVVTVPSSSLGTKTYTCNVDHKPSNTKVDKRV

SEQ ID NO: 976 - protein, 98 aa, Artificial Sequence
  Description of Artificial Sequence: Synthetic polypeptide
  IgG4 CH1(-)
ASTKGPSVFPLAPCSRSTSESTAALGCLVKDYFPEPVTVSWNSGALTSGVHTFPAVLQSSGLYSLSSVVTVPSSSLGTKTYTCNVDHKPSDTKVDKRV

SEQ ID NO: 977 - protein, 15 aa, Artificial Sequence
  Description of Artificial Sequence: Synthetic peptide
  IgG1 hinge
EPKSCDKTHTCPPCP

SEQ ID NO: 978 - protein, 12 aa, Artificial Sequence
  Description of Artificial Sequence: Synthetic peptide
  IgG2 hinge
ERKCCVECPPCP

SEQ ID NO: 979 - protein, 12 aa, Artificial Sequence
  Description of Artificial Sequence: Synthetic peptide
  IgG4 hinge
ESKYGPPCPSCP

SEQ ID NO: 980 - protein, 107 aa, Artificial Sequence [sequence omitted]

SEQ ID NO: 981 - protein, 106 aa, Artificial Sequence
  Description of Artificial Sequence: Synthetic polypeptide
  Light Chain Constant Domain - Lambda
GQPKAAPSVTLFPPSSEELQANKATLVCLISDFYPGAVTVAWKADSSPVKAGVETTTPSKQSNNKYAASSYLSLTPEQWKSHRSYSCQVTHEGSTVEKTVAPTECS

SEQ ID NO: 982 - protein, 442 aa, Artificial Sequence
  Description of Artificial Sequence: Synthetic polypeptide
  XENP16432 Heavy Chain
QVQLVESGGGVVQPGRSLRLDCKASGITFSNSGMHWVRQAPGKGLEWVAVIWYDGSKRYYADSVKGRFTISRDNSKNTLFLQMNSLRAEDTAVYYCATNDDYWGQGTLVTVSSASTKGPSVFPLAPSSKSTSGGTAALGCLVKDYFPEPVTVSWNSGALTSGVHTFPAVLQSSGLYSLSSVVTVPSSSLGTQTYICNVNHKPSNTKVDKKVEPKSCDKTHTCPPCPAPPVAGPSVFLFPPKPKDTLMISRTPEVTCVVVDVKHEDPEVKFNWYVDGVEVHNAKTKPREEQYNSTYRVVSVLTVLHQDWLNGKEYKCKVSNKALPAPIEKTISKAKGQPREPQVYTLPPSREEMTKNQVSLTCLVKGFYPSDIAVEWESNGQPENNYKTTPPVLDSDGSFFLYSKLTVDKSRWQQGNVFSCSVMHEALHNHYTQKSLSLSPGK

SEQ ID NO: 983 - protein, 214 aa, Artificial Sequence
  Description of Artificial Sequence: Synthetic polypeptide
  XENP16432 Light Chain
EIVLTQSPATLSLSPGERATLSCRASQSVSSYLAWYQQKPGQAPRLLIYDASNRATGIPARFSGSGSGTDFTLTISSLEPEDFAVYYCQQSSNWPRTFGQGTKVEIKRTVAAPSVFIFPPSDEQLKSGTASVVCLLNNFYPREAKVQWKVDNALQSGNSQESVTEQDSKDSTYSLSSTLTLSKADYEKHKVYACEVTHQGLSSPVTKSFNRGEC

SEQ ID NO: 984 - protein, 121 aa, Artificial Sequence
  Description of Artificial Sequence: Synthetic polypeptide
  1A7[CD28]_H1L1 Variable heavy (vh) domain
EVQLLESGGGLVQPGGSLRLSCAASGFTFSSYAMSWVRQAPGKGLEWVSTISGSGDSTYYADSVKGRFTISRDNSKNTLYLQMNSLRAEDTAVYYCAKSGPGLRQVGFDYWGQGTLVTVSS

SEQ ID NO: 985 - protein, 5 aa, Artificial Sequence
  Description of Artificial Sequence: Synthetic peptide
  1A7[CD28]_H1L1 vhCDR1
SYAMS

SEQ ID NO: 986 - protein, 17 aa, Artificial Sequence
  Description of Artificial Sequence: Synthetic peptide
  1A7[CD28]_H1L1 vhCDR2
TISGSGDSTYYADSVKG

SEQ ID NO: 987 - protein, 12 aa, Artificial Sequence
  Description of Artificial Sequence: Synthetic peptide
  1A7[CD28]_H1L1 vhCDR3
SGPGLRQVGFDY

SEQ ID NO: 988 - protein, 107 aa, Artificial Sequence
  Description of Artificial Sequence: Synthetic polypeptide
  1A7[CD28]_H1L1 Variable light (vl) domain
DIQMTQSPSSLSASVGDRVTITCRASQSISSYLNWYQQKPGKAPKLLIYAASSLQSGVPSRFSGSGSGTDFTLTISSLQPEDFATYYCQQSYSTPFTFGQGTKLEIK

SEQ ID NO: 989 - protein, 11 aa, Artificial Sequence
  Description of Artificial Sequence: Synthetic peptide
  1A7[CD28]_H1L1 vlCDR1
RASQSISSYLN

SEQ ID NO: 990 - protein, 7 aa, Artificial Sequence
  Description of Artificial Sequence: Synthetic peptide
  1A7[CD28]_H1L1 vlCDR2
AASSLQS

SEQ ID NO: 991 - protein, 9 aa, Artificial Sequence
  Description of Artificial Sequence: Synthetic peptide
  1A7[CD28]_H1L1 vlCDR3
QQSYSTPFT

SEQ ID NO: 992 - protein, 450 aa, Artificial Sequence
  Description of Artificial Sequence: Synthetic polypeptide
  XENP28428 Heavy Chain
EVQLLESGGGLVQPGGSLRLSCAASGFTFSSYAMSWVRQAPGKGLEWVSTISGSGDSTYYADSVKGRFTISRDNSKNTLYLQMNSLRAEDTAVYYCAKSGPGLRQVGFDYWGQGTLVTVSSASTKGPSVFPLAPSSKSTSGGTAALGCLVKDYFPEPVTVSWNSGALTSGVHTFPAVLQSSGLYSLSSVVTVPSSSLGTQTYICNVNHKPSNTKVDKKVEPKSCDKTHTCPPCPAPPVAGPSVFLFPPKPKDTLMISRTPEVTCVVVDVKHEDPEVKFNWYVDGVEVHNAKTKPREEQYNSTYRVVSVLTVLHQDWLNGKEYKCKVSNKALPAPIEKTISKAKGQPREPQVYTLPPSREEMTKNQVSLTCLVKGFYPSDIAVEWESNGQPENNYKTTPPVLDSDGSFFLYSKLTVDKSRWQQGNVFSCSVMHEALHNHYTQKSLSLSPGK

SEQ ID NO: 993 - protein, 214 aa, Artificial Sequence
  Description of Artificial Sequence: Synthetic polypeptide
  XENP28428 Light Chain
DIQMTQSPSSLSASVGDRVTITCRASQSISSYLNWYQQKPGKAPKLLIYAASSLQSGVPSRFSGSGSGTDFTLTISSLQPEDFATYYCQQSYSTPFTFGQGTKLEIKRTVAAPSVFIFPPSDEQLKSGTASVVCLLNNFYPREAKVQWKVDNALQSGNSQESVTEQDSKDSTYSLSSTLTLSKADYEKHKVYACEVTHQGLSSPVTKSFNRGEC

SEQ ID NO: 994 - protein, 121 aa, Artificial Sequence; identical to SEQ ID NO: 561
  Description of Artificial Sequence: Synthetic polypeptide
  Variable heavy (vh) domain 1A7_H1.1

SEQ ID NO: 995 - protein, 5 aa, Artificial Sequence
  Description of Artificial Sequence: Synthetic peptide
  vhCDR1
SYYMS

SEQ ID NO: 996 - protein, 17 aa, Artificial Sequence
  Description of Artificial Sequence: Synthetic peptide
  vhCDR2
TISGSGDSTYYADSVKG

SEQ ID NO: 997 - protein, 12 aa, Artificial Sequence
  Description of Artificial Sequence: Synthetic peptide
  vhCDR3
SGPGLRQVGFDY

SEQ ID NO: 998 - protein, 121 aa, Artificial Sequence; identical to SEQ ID NO: 574
  Description of Artificial Sequence: Synthetic polypeptide
  Variable heavy (vh) domain 1A7_H1.14

SEQ ID NO: 999 - protein, 5 aa, Artificial Sequence
  Description of Artificial Sequence: Synthetic peptide
  vhCDR1
SYYMS

SEQ ID NO: 1000 - protein, 17 aa, Artificial Sequence
  Description of Artificial Sequence: Synthetic peptide
  vhCDR2
TISESGDSTYYADSVKG

SEQ ID NO: 1001 - protein, 12 aa, Artificial Sequence
  Description of Artificial Sequence: Synthetic peptide
  vhCDR3
SGPGLRQVGFDY

SEQ ID NO: 1002 - protein, 107 aa, Artificial Sequence; identical to SEQ ID NO: 700
  Description of Artificial Sequence: Synthetic polypeptide
  Variable light (vl) domain 1A7_L1.71

SEQ ID NO: 1003 - protein, 11 aa, Artificial Sequence
  Description of Artificial Sequence: Synthetic peptide
  vlCDR1
RASQSISSYLN

SEQ ID NO: 1004 - protein, 7 aa, Artificial Sequence
  Description of Artificial Sequence: Synthetic peptide
  vlCDR2
AASSLQS

SEQ ID NO: 1005 - protein, 9 aa, Artificial Sequence
  Description of Artificial Sequence: Synthetic peptide
  vlCDR3
QQVYSTPFT

SEQ ID NO: 1006 - protein, 121 aa, Artificial Sequence; identical to SEQ ID NO: 984
  Description of Artificial Sequence: Synthetic polypeptide
  1A7[CD28]_H1_L1.71 Variable Heavy (vh) Domain

SEQ ID NO: 1007 - protein, 5 aa, Artificial Sequence
  Description of Artificial Sequence: Synthetic peptide
  1A7[CD28]_H1_L1.71 vhCDR1
SYAMS

SEQ ID NO: 1008 - protein, 17 aa, Artificial Sequence
  Description of Artificial Sequence: Synthetic peptide
  1A7[CD28]_H1_L1.71 vhCDR2
TISGSGDSTYYADSVKG

SEQ ID NO: 1009 - protein, 12 aa, Artificial Sequence
  Description of Artificial Sequence: Synthetic peptide
  1A7[CD28]_H1_L1.71 vhCDR3
SGPGLRQVGFDY

SEQ ID NO: 1010 - protein, 107 aa, Artificial Sequence; identical to SEQ ID NO: 700
  Description of Artificial Sequence: Synthetic polypeptide
  1A7[CD28]_H1_L1.71 Variable Light (vl) Domain

SEQ ID NO: 1011 - protein, 11 aa, Artificial Sequence
  Description of Artificial Sequence: Synthetic peptide
  1A7[CD28]_H1_L1.71 vlCDR1
RASQSISSYLN

SEQ ID NO: 1012 - protein, 7 aa, Artificial Sequence
  Description of Artificial Sequence: Synthetic peptide
  1A7[CD28]_H1_L1.71 vlCDR2
AASSLQS

SEQ ID NO: 1013 - protein, 9 aa, Artificial Sequence
  Description of Artificial Sequence: Synthetic peptide
  1A7[CD28]_H1_L1.71 vlCDR3
QQVYSTPFT

SEQ ID NO: 1014 - protein, 121 aa, Artificial Sequence; identical to SEQ ID NO: 561
  Description of Artificial Sequence: Synthetic polypeptide
  1A7[CD28]_H1.1_L1.71 Variable Heavy (vh) Domain

SEQ ID NO: 1015 - protein, 5 aa, Artificial Sequence
  Description of Artificial Sequence: Synthetic peptide
  1A7[CD28]_H1.1_L1.71 vhCDR1
SYYMS

SEQ ID NO: 1016 - protein, 17 aa, Artificial Sequence
  Description of Artificial Sequence: Synthetic peptide
  1A7[CD28]_H1.1_L1.71 vhCDR2
TISGSGDSTYYADSVKG

SEQ ID NO: 1017 - protein, 12 aa, Artificial Sequence
  Description of Artificial Sequence: Synthetic peptide
  1A7[CD28]_H1.1_L1.71 vhCDR3
SGPGLRQVGFDY

SEQ ID NO: 1018 - protein, 107 aa, Artificial Sequence; identical to SEQ ID NO: 700
  Description of Artificial Sequence: Synthetic polypeptide
  1A7[CD28]_H1.1_L1.71 Variable Light (vl) Domain

SEQ ID NO: 1019 - protein, 11 aa, Artificial Sequence
  Description of Artificial Sequence: Synthetic peptide
  1A7[CD28]_H1.1_L1.71 vlCDR1
RASQSISSYLN

SEQ ID NO: 1020 - protein, 7 aa, Artificial Sequence
  Description of Artificial Sequence: Synthetic peptide
  1A7[CD28]_H1.1_L1.71 vlCDR2
AASSLQS

SEQ ID NO: 1021 - protein, 9 aa, Artificial Sequence
  Description of Artificial Sequence: Synthetic peptide
  1A7[CD28]_H1.1_L1.71 vlCDR3
QQVYSTPFT

SEQ ID NO: 1022 - protein, 121 aa, Artificial Sequence; identical to SEQ ID NO: 574
  Description of Artificial Sequence: Synthetic polypeptide
  1A7[CD28]_H1.14_L1 Variable Heavy (vh) Domain

SEQ ID NO: 1023 - protein, 5 aa, Artificial Sequence
  Description of Artificial Sequence: Synthetic peptide
  1A7[CD28]_H1.14_L1 vhCDR1
SYYMS

SEQ ID NO: 1024 - protein, 17 aa, Artificial Sequence
  Description of Artificial Sequence: Synthetic peptide
  1A7[CD28]_H1.14_L1 vhCDR2
TISESGDSTYYADSVKG

SEQ ID NO: 1025 - protein, 12 aa, Artificial Sequence
  Description of Artificial Sequence: Synthetic peptide
  1A7[CD28]_H1.14_L1 vhCDR3
SGPGLRQVGFDY

SEQ ID NO: 1026 - protein, 107 aa, Artificial Sequence; identical to SEQ ID NO: 988
  Description of Artificial Sequence: Synthetic polypeptide
  1A7[CD28]_H1.14_L1 Variable Light (vl) Domain

SEQ ID NO: 1027 - protein, 11 aa, Artificial Sequence
  Description of Artificial Sequence: Synthetic peptide
  1A7[CD28]_H1.14_L1 vlCDR1
RASQSISSYLN

SEQ ID NO: 1028 - protein, 7 aa, Artificial Sequence
  Description of Artificial Sequence: Synthetic peptide
  1A7[CD28]_H1.14_L1 vlCDR2
AASSLQS

SEQ ID NO: 1029 - protein, 9 aa, Artificial Sequence
  Description of Artificial Sequence: Synthetic peptide
  1A7[CD28]_H1.14_L1 vlCDR3
QQSYSTPFT

SEQ ID NO: 1030 - protein, 121 aa, Artificial Sequence; identical to SEQ ID NO: 574
  Description of Artificial Sequence: Synthetic polypeptide
  1A7[CD28]_H1.14_L1.71 Variable Heavy (vh) Domain

SEQ ID NO: 1031 - protein, 5 aa, Artificial Sequence
  Description of Artificial Sequence: Synthetic peptide
  1A7[CD28]_H1.14_L1.71 vhCDR1
SYYMS

SEQ ID NO: 1032 - protein, 17 aa, Artificial Sequence
  Description of Artificial Sequence: Synthetic peptide
  1A7[CD28]_H1.14_L1.71 vhCDR2
TISESGDSTYYADSVKG

SEQ ID NO: 1033 - protein, 12 aa, Artificial Sequence
  Description of Artificial Sequence: Synthetic peptide
  1A7[CD28]_H1.14_L1.71 vhCDR3
SGPGLRQVGFDY

SEQ ID NO: 1034 - protein, 107 aa, Artificial Sequence; identical to SEQ ID NO: 700
  Description of Artificial Sequence: Synthetic polypeptide
  1A7[CD28]_H1.14_L1.71 Variable Light (vl) Domain

SEQ ID NO: 1035 - protein, 11 aa, Artificial Sequence
  Description of Artificial Sequence: Synthetic peptide
  1A7[CD28]_H1.14_L1.71 vlCDR1
RASQSISSYLN

SEQ ID NO: 1036 - protein, 7 aa, Artificial Sequence
  Description of Artificial Sequence: Synthetic peptide
  1A7[CD28]_H1.14_L1.71 vlCDR2
AASSLQS

SEQ ID NO: 1037 - protein, 9 aa, Artificial Sequence
  Description of Artificial Sequence: Synthetic peptide
  1A7[CD28]_H1.14_L1.71 vlCDR3
QQVYSTPFT

SEQ ID NO: 1038 - protein, 450 aa, Artificial Sequence
  Description of Artificial Sequence: Synthetic polypeptide
  XENP27181 Heavy Chain
QVQLQESGPGLVKPSETLSLTCAVSGFSLTSYGVHWIRQPPGKGLEWLGVIWPGGGTNFNSALMSRLTISEDTSKNQVSLKLSSVTAADTAVYYCARDRAYGNYLYAMDYWGQGTLVTVSSASTKGPSVFPLAPSSKSTSGGTAALGCLVKDYFPEPVTVSWNSGALTSGVHTFPAVLQSSGLYSLSSVVTVPSSSLGTQTYICNVNHKPSNTKVDKKVEPKSCDKTHTCPPCPAPPVAGPSVFLFPPKPKDTLMISRTPEVTCVVVDVKHEDPEVKFNWYVDGVEVHNAKTKPREEQYNSTYRVVSVLTVLHQDWLNGKEYKCKVSNKALPAPIEKTISKAKGQPREPQVYTLPPSREEMTKNQVSLTCLVKGFYPSDIAVEWESNGQPENNYKTTPPVLDSDGSFFLYSKLTVDKSRWQQGNVFSCSVMHEALHNHYTQKSLSLSPGK

SEQ ID NO: 1039 - protein, 218 aa, Artificial Sequence
  Description of Artificial Sequence: Synthetic polypeptide
  XENP27181 Light Chain
DIQMTQSPSSLSASVGDRVTITCRASESVEYYVTSLMQWYQQKPGKAPKLLIYAASNVDSGVPSRFSGSGSGTDFTLTISSLQPEDIATYYCQQSRKVPFTFGGGTKVEIKRTVAAPSVFIFPPSDEQLKSGTASVVCLLNNFYPREAKVQWKVDNALQSGNSQESVTEQDSKDSTYSLSSTLTLSKADYEKHKVYACEVTHQGLSSPVTKSFNRGEC

SEQ ID NO: 1040 - protein, 231 aa, Artificial Sequence
  Description of Artificial Sequence: Synthetic polypeptide
  XENP27656 Chain 1 - empty-Fc(216)_IgG1_pI(-)_Isosteric_A_C220S/P VA_/S267K/L368D/K370S empty-Fc Heavy Chain
EPKSSDKTHTCPPCPAPPVAGPSVFLFPPKPKDTLMISRTPEVTCVVVDVKHEDPEVKFNWYVDGVEVHNAKTKPREEEYNSTYRVVSVLTVLHQDWLNGKEYKCKVSNKALPAPIEKTISKAKGQPREPQVYTLPPSREEMTKNQVSLTCDVSGFYPSDIAVEWESDGQPENNYKTTPPVLDSDGSFFLYSKLTVDKSRWEQGDVFSCSVMHEALHNHYTQKSLSLSPGK

SEQ ID NO: 1041 - protein, 483 aa, Artificial Sequence
  Description of Artificial Sequence: Synthetic polypeptide
  XENP27656 Chain 2 - HuTN228[CD28]_H1L1_scFv(GKPGS)4-Fc(216)_IgG1 _C220S/PVA_/S267K/S364K/E357Q scFv-Fc Heavy Chain
QVQLQESGPGLVKPSETLSLTCAVSGFSLTSYGVHWIRQPPGKGLEWLGVIWPGGGTNFNSALMSRLTISEDTSKNQVSLKLSSVTAADTAVYYCARDRAYGNYLYAMDYWGQGTLVTVSSGKPGSGKPGSGKPGSGKPGSDIQMTQSPSSLSASVGDRVTITCRASESVEYYVTSLMQWYQQKPGKAPKLLIYAASNVDSGVPSRFSGSGSGTDFTLTISSLQPEDIATYYCQQSRKVPFTFGGGTKVEIKEPKSSDKTHTCPPCPAPPVAGPSVFLFPPKPKDTLMISRTPEVTCVVVDVKHEDPEVKFNWYVDGVEVHNAKTKPREEQYNSTYRVVSVLTVLHQDWLNGKEYKCKVSNKALPAPIEKTISKAKGQPREPQVYTLPPSREQMTKNQVKLTCLVKGFYPSDIAVEWESNGQPENNYKTTPPVLDSDGSFFLYSKLTVDKSRWQQGNVFSCSVMHEALHNHYTQKSLSLSPGK

SEQ ID NO: 1042 - protein, 118 aa, Artificial Sequence
  Description of Artificial Sequence: Synthetic polypeptide
  2G4[PDL1]_H1L1 Variable heavy (vh) domain
EVQLLESGGGLVQPGGSLRLSCAASGFTFSSYDMSWVRQAPGKRLEWVSTISSGGSFTHYPDSVKGRFTISRDNSKNTLYLQMNSLRAEDTAVYYCVRRSGDWYFDVWGAGTTVTVSS

SEQ ID NO: 1043 - protein, 5 aa, Artificial Sequence
  Description of Artificial Sequence: Synthetic peptide
  2G4[PDL1]_H1L1 vhCDR1
SYDMS

SEQ ID NO: 1044 - protein, 17 aa, Artificial Sequence
  Description of Artificial Sequence: Synthetic peptide
  2G4[PDL1]_H1L1 vhCDR2
TISSGGSFTHYPDSVKG

SEQ ID NO: 1045 - protein, 9 aa, Artificial Sequence
  Description of Artificial Sequence: Synthetic peptide
  2G4[PDL1]_H1L1 vhCDR3
RSGDWYFDV

SEQ ID NO: 1046 - protein, 109 aa, Artificial Sequence
  Description of Artificial Sequence: Synthetic polypeptide
  2G4[PDL1]_H1L1 Variable light (vl) domain
EIVLTQSPGTLSLSPGERATLSCRVSSSISSSNLHWYQQKPGQSPRPLIYGTSNLASGVPVRFSGSGSGTDYTLTISRLEPEDFAVYYCQQWSSYPLYTFGGGTKVEIK

SEQ ID NO: 1047 - protein, 12 aa, Artificial Sequence
  Description of Artificial Sequence: Synthetic peptide
  2G4[PDL1]_H1L1 vlCDR1
RVSSSISSSNLH

SEQ ID NO: 1048 - protein, 7 aa, Artificial Sequence
  Description of Artificial Sequence: Synthetic peptide
  2G4[PDL1]_H1L1 vlCDR2
GTSNLAS

SEQ ID NO: 1049 - protein, 10 aa, Artificial Sequence
  Description of Artificial Sequence: Synthetic peptide
  2G4[PDL1]_H1L1 vlCDR3
QQWSSYPLYT

SEQ ID NO: 1050 - protein, 447 aa, Artificial Sequence
  Description of Artificial Sequence: Synthetic polypeptide
  XENP25859 Heavy Chain - 2G4[PD-L1]_H1 Heavy Chain
EVQLLESGGGLVQPGGSLRLSCAASGFTFSSYDMSWVRQAPGKRLEWVSTISSGGSFTHYPDSVKGRFTISRDNSKNTLYLQMNSLRAEDTAVYYCVRRSGDWYFDVWGAGTTVTVSSASTKGPSVFPLAPSSKSTSGGTAALGCLVKDYFPEPVTVSWNSGALTSGVHTFPAVLQSSGLYSLSSVVTVPSSSLGTQTYICNVNHKPSNTKVDKKVEPKSCDKTHTCPPCPAPPVAGPSVFLFPPKPKDTLMISRTPEVTCVVVDVKHEDPEVKFNWYVDGVEVHNAKTKPREEQYNSTYRVVSVLTVLHQDWLNGKEYKCKVSNKALPAPIEKTISKAKGQPREPQVYTLPPSREEMTKNQVSLTCLVKGFYPSDIAVEWESNGQPENNYKTTPPVLDSDGSFFLYSKLTVDKSRWQQGNVFSCSVMHEALHNHYTQKSLSLSPGK

SEQ ID NO: 1051 - protein, 216 aa, Artificial Sequence
  Description of Artificial Sequence: Synthetic polypeptide
  XENP25859 Light Chain - 2G4[PD-L1]_L1 Light Chain
EIVLTQSPGTLSLSPGERATLSCRVSSSISSSNLHWYQQKPGQSPRPLIYGTSNLASGVPVRFSGSGSGTDYTLTISRLEPEDFAVYYCQQWSSYPLYTFGGGTKVEIKRTVAAPSVFIFPPSDEQLKSGTASVVCLLNNFYPREAKVQWKVDNALQSGNSQESVTEQDSKDSTYSLSSTLTLSKADYEKHKVYACEVTHQGLSSPVTKSFNRGEC

SEQ ID NO: 1052 - protein, 447 aa, Artificial Sequence
  Description of Artificial Sequence: Synthetic polypeptide
  XENP36627 Chain 1 -  2G4[PD-L1]_H1_IgG1_pI(-)_Isosteric_A_PVA_/S 267K/L368D/K370S
EVQLLESGGGLVQPGGSLRLSCAASGFTFSSYDMSWVRQAPGKRLEWVSTISSGGSFTHYPDSVKGRFTISRDNSKNTLYLQMNSLRAEDTAVYYCVRRSGDWYFDVWGAGTTVTVSSASTKGPSVFPLAPSSKSTSGGTAALGCLVKDYFPEPVTVSWNSGALTSGVHTFPAVLQSSGLYSLSSVVTVPSSSLGTQTYICNVNHKPSDTKVDKKVEPKSCDKTHTCPPCPAPPVAGPSVFLFPPKPKDTLMISRTPEVTCVVVDVKHEDPEVKFNWYVDGVEVHNAKTKPREEEYNSTYRVVSVLTVLHQDWLNGKEYKCKVSNKALPAPIEKTISKAKGQPREPQVYTLPPSREEMTKNQVSLTCDVSGFYPSDIAVEWESDGQPENNYKTTPPVLDSDGSFFLYSKLTVDKSRWEQGDVFSCSVMHEALHNHYTQKSLSLSPGK

SEQ ID NO: 1053 - protein, 231 aa, Artificial Sequence
  Description of Artificial Sequence: Synthetic polypeptide
  XENP36627 Chain 2 -  empty-Fc(216)_IgG1_ISO(+RR)_C220S/PVA_/S267 K/S364K/E357Q
ERKSSDKTHTCPRCPAPPVAGPSVFLFPPKPKDTLMISRTPEVTCVVVDVKHEDPEVKFKWYVDGVEVHNAKTKPREEQYNSTYRVVSVLTVLHQDWLNGKEYKCKVSNKALPAPIEKTISKAKGQPREPQVYTLPPSREQMTKNQVKLTCLVKGFYPSDIAVEWESNGQPENNYKTTPPVLDSDGSFFLYSKLTVDKSRWQQGNVFSCSVMHEALHNHYTQKSLSLSPGK

SEQ ID NO: 1054 - protein, 216 aa, Artificial Sequence; identical to SEQ ID NO: 1051
  Description of Artificial Sequence: Synthetic polypeptide
  XENP36627 Chain 3 -  2G4[PD-L1]_L1

SEQ ID NO: 1055 - protein, 118 aa, Artificial Sequence; identical to SEQ ID NO: 736
  Description of Artificial Sequence: Synthetic polypeptide
  Variable heavy (vh) domain 2G4_H1.1

SEQ ID NO: 1056 - protein, 5 aa, Artificial Sequence
  Description of Artificial Sequence: Synthetic peptide
  vhCDR1
SRDMS

SEQ ID NO: 1057 - protein, 17 aa, Artificial Sequence
  Description of Artificial Sequence: Synthetic peptide
  vhCDR2
TISSGGSFTHYPDSVKG

SEQ ID NO: 1058 - protein, 9 aa, Artificial Sequence
  Description of Artificial Sequence: Synthetic peptide
  vhCDR3
RSGDWYFDV

SEQ ID NO: 1059 - protein, 118 aa, Artificial Sequence; identical to SEQ ID NO: 739
  Description of Artificial Sequence: Synthetic polypeptide
  Variable heavy (vh) domain 2G4_H1.4

SEQ ID NO: 1060 - protein, 5 aa, Artificial Sequence
  Description of Artificial Sequence: Synthetic peptide
  vhCDR1
SYDMS

SEQ ID NO: 1061 - protein, 17 aa, Artificial Sequence
  Description of Artificial Sequence: Synthetic peptide
  vhCDR2
TISSGGSFTHYPDSVKG

SEQ ID NO: 1062 - protein, 9 aa, Artificial Sequence
  Description of Artificial Sequence: Synthetic peptide
  vhCDR3
RSLDWYFDV

SEQ ID NO: 1063 - protein, 118 aa, Artificial Sequence; identical to SEQ ID NO: 741
  Description of Artificial Sequence: Synthetic polypeptide
  Variable heavy (vh) domain 2G4_H1.6

SEQ ID NO: 1064 - protein, 5 aa, Artificial Sequence
  Description of Artificial Sequence: Synthetic peptide
  vhCDR1
SRDMS

SEQ ID NO: 1065 - protein, 17 aa, Artificial Sequence
  Description of Artificial Sequence: Synthetic peptide
  vhCDR2
TISSGGRFTHYPDSVKG

SEQ ID NO: 1066 - protein, 9 aa, Artificial Sequence
  Description of Artificial Sequence: Synthetic peptide
  vhCDR3
RSGDWYFDV

SEQ ID NO: 1067 - protein, 118 aa, Artificial Sequence; identical to SEQ ID NO: 743
  Description of Artificial Sequence: Synthetic polypeptide
  Variable heavy (vh) domain 2G4_H1.8

SEQ ID NO: 1068 - protein, 5 aa, Artificial Sequence
  Description of Artificial Sequence: Synthetic peptide
  vhCDR1
SSDMS

SEQ ID NO: 1069 - protein, 17 aa, Artificial Sequence
  Description of Artificial Sequence: Synthetic peptide
  vhCDR2
TISSGGSFTHYPDSVKG

SEQ ID NO: 1070 - protein, 9 aa, Artificial Sequence
  Description of Artificial Sequence: Synthetic peptide
  vhCDR3
RSGDWYFDV

SEQ ID NO: 1071 - protein, 118 aa, Artificial Sequence; identical to SEQ ID NO: 744
  Description of Artificial Sequence: Synthetic polypeptide
  Variable heavy (vh) domain 2G4_H1.9

SEQ ID NO: 1072 - protein, 5 aa, Artificial Sequence
  Description of Artificial Sequence: Synthetic peptide
  vhCDR1
FRDMS

SEQ ID NO: 1073 - protein, 17 aa, Artificial Sequence
  Description of Artificial Sequence: Synthetic peptide
  vhCDR2
TISSGGSFTHYPDSVKG

SEQ ID NO: 1074 - protein, 9 aa, Artificial Sequence
  Description of Artificial Sequence: Synthetic peptide
  vhCDR3
RSGDWYFDV

SEQ ID NO: 1075 - protein, 118 aa, Artificial Sequence; identical to SEQ ID NO: 745
  Description of Artificial Sequence: Synthetic polypeptide
  Variable heavy (vh) domain 2G4_H1.10

SEQ ID NO: 1076 - protein, 5 aa, Artificial Sequence
  Description of Artificial Sequence: Synthetic peptide
  vhCDR1
WYDMS

SEQ ID NO: 1077 - protein, 17 aa, Artificial Sequence
  Description of Artificial Sequence: Synthetic peptide
  vhCDR2
TISSGGSFTHYPDSVKG

SEQ ID NO: 1078 - protein, 9 aa, Artificial Sequence
  Description of Artificial Sequence: Synthetic peptide
  vhCDR3
RSGDWYFDV

SEQ ID NO: 1079 - protein, 118 aa, Artificial Sequence; identical to SEQ ID NO: 747
  Description of Artificial Sequence: Synthetic polypeptide
  Variable heavy (vh) domain 2G4_H1.12

SEQ ID NO: 1080 - protein, 5 aa, Artificial Sequence
  Description of Artificial Sequence: Synthetic peptide
  vhCDR1
VYDMS

SEQ ID NO: 1081 - protein, 17 aa, Artificial Sequence
  Description of Artificial Sequence: Synthetic peptide
  vhCDR2
TISSGGSFTHYPDSVKG

SEQ ID NO: 1082 - protein, 9 aa, Artificial Sequence
  Description of Artificial Sequence: Synthetic peptide
  vhCDR3
RSLDWYFDV

SEQ ID NO: 1083 - protein, 118 aa, Artificial Sequence; identical to SEQ ID NO: 749
  Description of Artificial Sequence: Synthetic polypeptide
  Variable heavy (vh) domain 2G4_H1.14

SEQ ID NO: 1084 - protein, 5 aa, Artificial Sequence
  Description of Artificial Sequence: Synthetic peptide
  vhCDR1
SSDMS

SEQ ID NO: 1085 - protein, 17 aa, Artificial Sequence
  Description of Artificial Sequence: Synthetic peptide
  vhCDR2
TISSGGSFTHYPDSVKG

SEQ ID NO: 1086 - protein, 9 aa, Artificial Sequence
  Description of Artificial Sequence: Synthetic peptide
  vhCDR3
RSLDWYFDV

SEQ ID NO: 1087 - protein, 118 aa, Artificial Sequence; identical to SEQ ID NO: 794
  Description of Artificial Sequence: Synthetic polypeptide
  Variable heavy (vh) domain 2G4_H1.59

SEQ ID NO: 1088 - protein, 5 aa, Artificial Sequence
  Description of Artificial Sequence: Synthetic peptide
  vhCDR1
SRDMS

SEQ ID NO: 1089 - protein, 17 aa, Artificial Sequence
  Description of Artificial Sequence: Synthetic peptide
  vhCDR2
TISSGGRFTHYPDSVKG

SEQ ID NO: 1090 - protein, 9 aa, Artificial Sequence
  Description of Artificial Sequence: Synthetic peptide
  vhCDR3
RSGDWYFDV

SEQ ID NO: 1091 - protein, 118 aa, Artificial Sequence; identical to SEQ ID NO: 795
  Description of Artificial Sequence: Synthetic polypeptide
  Variable heavy (vh) domain 2G4_H1.60

SEQ ID NO: 1092 - protein, 5 aa, Artificial Sequence
  Description of Artificial Sequence: Synthetic peptide
  vhCDR1
SSDMS

SEQ ID NO: 1093 - protein, 17 aa, Artificial Sequence
  Description of Artificial Sequence: Synthetic peptide
  vhCDR2
TISSGGSFTHYPDSVKG

SEQ ID NO: 1094 - protein, 9 aa, Artificial Sequence
  Description of Artificial Sequence: Synthetic peptide
  vhCDR3
RSLDWYFDV

SEQ ID NO: 1095 - protein, 118 aa, Artificial Sequence; identical to SEQ ID NO: 796
  Description of Artificial Sequence: Synthetic polypeptide
  Variable heavy (vh) domain 2G4_H1.61

SEQ ID NO: 1096 - protein, 5 aa, Artificial Sequence
  Description of Artificial Sequence: Synthetic peptide
  vhCDR1
SYDMS

SEQ ID NO: 1097 - protein, 17 aa, Artificial Sequence
  Description of Artificial Sequence: Synthetic peptide
  vhCDR2
TISSGGSFTHYPDSVKG

SEQ ID NO: 1098 - protein, 9 aa, Artificial Sequence
  Description of Artificial Sequence: Synthetic peptide
  vhCDR3
RSLDWYFDV

SEQ ID NO: 1099 - protein, 118 aa, Artificial Sequence; identical to SEQ ID NO: 797
  Description of Artificial Sequence: Synthetic polypeptide
  Variable heavy (vh) domain 2G4_H1.62

SEQ ID NO: 1100 - protein, 5 aa, Artificial Sequence
  Description of Artificial Sequence: Synthetic peptide
  vhCDR1
SYDMS

SEQ ID NO: 1101 - protein, 17 aa, Artificial Sequence
  Description of Artificial Sequence: Synthetic peptide
  vhCDR2
TISSGGSFTHYPDSVKG

SEQ ID NO: 1102 - protein, 9 aa, Artificial Sequence
  Description of Artificial Sequence: Synthetic peptide
  vhCDR3
RSGDWYFDV

SEQ ID NO: 1103 - protein, 109 aa, Artificial Sequence; identical to SEQ ID NO: 798
  Description of Artificial Sequence: Synthetic polypeptide
  Variable heavy (vh) domain 2G4_L1.1

SEQ ID NO: 1104 - protein, 12 aa, Artificial Sequence
  Description of Artificial Sequence: Synthetic peptide
  vlCDR1
RVSSSISSSNLH

SEQ ID NO: 1105 - protein, 7 aa, Artificial Sequence
  Description of Artificial Sequence: Synthetic peptide
  vlCDR2
GTSNLAS

SEQ ID NO: 1106 - protein, 10 aa, Artificial Sequence
  Description of Artificial Sequence: Synthetic peptide
  vlCDR3
QQWWSYPLYT

SEQ ID NO: 1107 - protein, 109 aa, Artificial Sequence; identical to SEQ ID NO: 800
  Description of Artificial Sequence: Synthetic polypeptide
  Variable heavy (vh) domain 2G4_L1.3

SEQ ID NO: 1108 - protein, 12 aa, Artificial Sequence
  Description of Artificial Sequence: Synthetic peptide
  vlCDR1
RVSSSISSSNLH

SEQ ID NO: 1109 - protein, 7 aa, Artificial Sequence
  Description of Artificial Sequence: Synthetic peptide
  vlCDR2
GTSNLAS

SEQ ID NO: 1110 - protein, 10 aa, Artificial Sequence
  Description of Artificial Sequence: Synthetic peptide
  vlCDR3
QQWSSYPLWT

SEQ ID NO: 1111 - protein, 109 aa, Artificial Sequence; identical to SEQ ID NO: 811
  Description of Artificial Sequence: Synthetic polypeptide
  Variable heavy (vh) domain 2G4_L1.14

SEQ ID NO: 1112 - protein, 12 aa, Artificial Sequence
  Description of Artificial Sequence: Synthetic peptide
  vlCDR1
RVSSSIQSSNLH

SEQ ID NO: 1113 - protein, 7 aa, Artificial Sequence
  Description of Artificial Sequence: Synthetic peptide
  vlCDR2
GTSNLAS

SEQ ID NO: 1114 - protein, 10 aa, Artificial Sequence
  Description of Artificial Sequence: Synthetic peptide
  vlCDR3
QQWSSYPLYT

SEQ ID NO: 1115 - protein, 109 aa, Artificial Sequence; identical to SEQ ID NO: 820
  Description of Artificial Sequence: Synthetic polypeptide
  Variable light (vl) domain 2G4_L1.23

SEQ ID NO: 1116 - protein, 12 aa, Artificial Sequence
  Description of Artificial Sequence: Synthetic peptide
  vlCDR1
RVSLSIQSSNLH

SEQ ID NO: 1117 - protein, 7 aa, Artificial Sequence
  Description of Artificial Sequence: Synthetic peptide
  vlCDR2
GTNLLAS

SEQ ID NO: 1118 - protein, 10 aa, Artificial Sequence
  Description of Artificial Sequence: Synthetic peptide
  vlCDR3
QQWSSYPLYT

SEQ ID NO: 1119 - protein, 109 aa, Artificial Sequence; identical to SEQ ID NO: 821
  Description of Artificial Sequence: Synthetic polypeptide
  Variable light (vl) domain 2G4_L1.24

SEQ ID NO: 1120 - protein, 12 aa, Artificial Sequence
  Description of Artificial Sequence: Synthetic peptide
  vlCDR1
RVSSSIQSTNLH

SEQ ID NO: 1121 - protein, 7 aa, Artificial Sequence
  Description of Artificial Sequence: Synthetic peptide
  vlCDR2
GTSVLAT

SEQ ID NO: 1122 - protein, 10 aa, Artificial Sequence
  Description of Artificial Sequence: Synthetic peptide
  vlCDR3
QQWSSYPLYT

SEQ ID NO: 1123 - protein, 109 aa, Artificial Sequence; identical to SEQ ID NO: 822
  Description of Artificial Sequence: Synthetic polypeptide
  Variable heavy (vh) domain 2G4_L1.25

SEQ ID NO: 1124 - protein, 12 aa, Artificial Sequence
  Description of Artificial Sequence: Synthetic peptide
  vlCDR1
RVSSSIQPSNLH

SEQ ID NO: 1125 - protein, 7 aa, Artificial Sequence
  Description of Artificial Sequence: Synthetic peptide
  vlCDR2
GTSNLAS

SEQ ID NO: 1126 - protein, 10 aa, Artificial Sequence
  Description of Artificial Sequence: Synthetic peptide
  vlCDR3
QQWSSYPLYT

SEQ ID NO: 1127 - protein, 109 aa, Artificial Sequence; identical to SEQ ID NO: 823
  Description of Artificial Sequence: Synthetic polypeptide
  Variable heavy (vh) domain 2G4_L1.26

SEQ ID NO: 1128 - protein, 12 aa, Artificial Sequence
  Description of Artificial Sequence: Synthetic peptide
  vlCDR1
RASSSIQDSNLH

SEQ ID NO: 1129 - protein, 7 aa, Artificial Sequence
  Description of Artificial Sequence: Synthetic peptide
  vlCDR2
GTSNLRS

SEQ ID NO: 1130 - protein, 10 aa, Artificial Sequence
  Description of Artificial Sequence: Synthetic peptide
  vlCDR3
QQWSSYPLYT

SEQ ID NO: 1131 - protein, 109 aa, Artificial Sequence; identical to SEQ ID NO: 824
  Description of Artificial Sequence: Synthetic polypeptide
  Variable heavy (vh) domain 2G4_L1.27

SEQ ID NO: 1132 - protein, 12 aa, Artificial Sequence
  Description of Artificial Sequence: Synthetic peptide
  vlCDR1
RVSSSIQGSNLH

SEQ ID NO: 1133 - protein, 7 aa, Artificial Sequence
  Description of Artificial Sequence: Synthetic peptide
  vlCDR2
GTSNLAS

SEQ ID NO: 1134 - protein, 10 aa, Artificial Sequence
  Description of Artificial Sequence: Synthetic peptide
  vlCDR3
QQWSSYPLYT

SEQ ID NO: 1135 - protein, 109 aa, Artificial Sequence; identical to SEQ ID NO: 826
  Description of Artificial Sequence: Synthetic polypeptide
  Variable heavy (vh) domain 2G4_L1.29

SEQ ID NO: 1136 - protein, 12 aa, Artificial Sequence
  Description of Artificial Sequence: Synthetic peptide
  vlCDR1
RVSSRIVLSNLH

SEQ ID NO: 1137 - protein, 7 aa, Artificial Sequence
  Description of Artificial Sequence: Synthetic peptide
  vlCDR2
GTSVLAT

SEQ ID NO: 1138 - protein, 10 aa, Artificial Sequence
  Description of Artificial Sequence: Synthetic peptide
  vlCDR3
QQWSSYPLWT

SEQ ID NO: 1139 - protein, 109 aa, Artificial Sequence; identical to SEQ ID NO: 857
  Description of Artificial Sequence: Synthetic polypeptide
  Variable heavy (vh) domain 2G4_L1.60

SEQ ID NO: 1140 - protein, 12 aa, Artificial Sequence
  Description of Artificial Sequence: Synthetic peptide
  vlCDR1
RASSSISSSNLH

SEQ ID NO: 1141 - protein, 7 aa, Artificial Sequence
  Description of Artificial Sequence: Synthetic peptide
  vlCDR2
GTSNLAS

SEQ ID NO: 1142 - protein, 10 aa, Artificial Sequence
  Description of Artificial Sequence: Synthetic peptide
  vlCDR3
QQWSSYPLWT

SEQ ID NO: 1143 - protein, 109 aa, Artificial Sequence; identical to SEQ ID NO: 858
  Description of Artificial Sequence: Synthetic polypeptide
  Variable heavy (vh) domain 2G4_L1.61

SEQ ID NO: 1144 - protein, 12 aa, Artificial Sequence
  Description of Artificial Sequence: Synthetic peptide
  vlCDR1
RASLSIQSSNLH

SEQ ID NO: 1145 - protein, 7 aa, Artificial Sequence
  Description of Artificial Sequence: Synthetic peptide
  vlCDR2
GTNLLAS

SEQ ID NO: 1146 - protein, 10 aa, Artificial Sequence
  Description of Artificial Sequence: Synthetic peptide
  vlCDR3
QQWSSYPLYT

SEQ ID NO: 1147 - protein, 109 aa, Artificial Sequence; identical to SEQ ID NO: 860
  Description of Artificial Sequence: Synthetic polypeptide
  Variable heavy (vh) domain 2G4_L1.63

SEQ ID NO: 1148 - protein, 12 aa, Artificial Sequence
  Description of Artificial Sequence: Synthetic peptide
  vlCDR1
RASSSISSSNLH

SEQ ID NO: 1149 - protein, 7 aa, Artificial Sequence
  Description of Artificial Sequence: Synthetic peptide
  vlCDR2
GTSNLAS

SEQ ID NO: 1150 - protein, 10 aa, Artificial Sequence
  Description of Artificial Sequence: Synthetic peptide
  vlCDR3
QQWSSYPLYT

SEQ ID NO: 1151 - protein, 109 aa, Artificial Sequence; identical to SEQ ID NO: 863
  Description of Artificial Sequence: Synthetic polypeptide
  Variable heavy (vh) domain 2G4_L1.66

SEQ ID NO: 1152 - protein, 12 aa, Artificial Sequence
  Description of Artificial Sequence: Synthetic peptide
  vlCDR1
RVSSSIQSTNLH

SEQ ID NO: 1153 - protein, 7 aa, Artificial Sequence
  Description of Artificial Sequence: Synthetic peptide
  vlCDR2
GTSNLAT

SEQ ID NO: 1154 - protein, 10 aa, Artificial Sequence
  Description of Artificial Sequence: Synthetic peptide
  vlCDR3
QQWSSYPLYT

SEQ ID NO: 1155 - protein, 109 aa, Artificial Sequence; identical to SEQ ID NO: 865
  Description of Artificial Sequence: Synthetic polypeptide
  Variable heavy (vh) domain 2G4_L1.68

SEQ ID NO: 1156 - protein, 12 aa, Artificial Sequence
  Description of Artificial Sequence: Synthetic peptide
  vlCDR1
RVSSSIQSTNLH

SEQ ID NO: 1157 - protein, 7 aa, Artificial Sequence
  Description of Artificial Sequence: Synthetic peptide
  vlCDR2
GTSNLAS

SEQ ID NO: 1158 - protein, 10 aa, Artificial Sequence
  Description of Artificial Sequence: Synthetic peptide
  vlCDR3
QQWSSYPLYT

SEQ ID NO: 1159 - protein, 118 aa, Artificial Sequence; identical to SEQ ID NO: 747
  Description of Artificial Sequence: Synthetic polypeptide
  2G4[CD28]_H1.12_L1.24 Variable Heavy (vh) Domain

SEQ ID NO: 1160 - protein, 5 aa, Artificial Sequence
  Description of Artificial Sequence: Synthetic peptide
  2G4[CD28]_H1.12_L1.24 vhCDR1
VYDMS

SEQ ID NO: 1161 - protein, 17 aa, Artificial Sequence
  Description of Artificial Sequence: Synthetic peptide
  2G4[CD28]_H1.12_L1.24 vhCDR2
TISSGGSFTHYPDSVKG

SEQ ID NO: 1162 - protein, 9 aa, Artificial Sequence
  Description of Artificial Sequence: Synthetic peptide
  2G4[CD28]_H1.12_L1.24 vhCDR3
RSLDWYFDV

SEQ ID NO: 1163 - protein, 109 aa, Artificial Sequence; identical to SEQ ID NO: 821
  Description of Artificial Sequence: Synthetic polypeptide
  2G4[CD28]_H1.12_L1.24 Variable Light (vl) Domain

SEQ ID NO: 1164 - protein, 12 aa, Artificial Sequence
  Description of Artificial Sequence: Synthetic peptide
  2G4[CD28]_H1.12_L1.24 vlCDR1
RVSSSIQSTNLH

SEQ ID NO: 1165 - protein, 7 aa, Artificial Sequence
  Description of Artificial Sequence: Synthetic peptide
  2G4[CD28]_H1.12_L1.24 vlCDR2
GTSVLAT

SEQ ID NO: 1166 - protein, 10 aa, Artificial Sequence
  Description of Artificial Sequence: Synthetic peptide
  2G4[CD28]_H1.12_L1.24 vlCDR3
QQWSSYPLYT

SEQ ID NO: 1167 - protein, 118 aa, Artificial Sequence; identical to SEQ ID NO: 747
  Description of Artificial Sequence: Synthetic polypeptide
  2G4[CD28]_H1.12_L1.66 Variable Heavy (vh) Domain

SEQ ID NO: 1168 - protein, 5 aa, Artificial Sequence
  Description of Artificial Sequence: Synthetic peptide
  2G4[CD28]_H1.12_L1.66 vhCDR1
VYDMS

SEQ ID NO: 1169 - protein, 17 aa, Artificial Sequence
  Description of Artificial Sequence: Synthetic peptide
  2G4[CD28]_H1.12_L1.66 vhCDR2
TISSGGSFTHYPDSVKG

SEQ ID NO: 1170 - protein, 9 aa, Artificial Sequence
  Description of Artificial Sequence: Synthetic peptide
  2G4[CD28]_H1.12_L1.66 vhCDR3
RSLDWYFDV

SEQ ID NO: 1171 - protein, 109 aa, Artificial Sequence; identical to SEQ ID NO: 863
  Description of Artificial Sequence: Synthetic polypeptide
  2G4[CD28]_H1.12_L1.66 Variable Light (vl) Domain

SEQ ID NO: 1172 - protein, 12 aa, Artificial Sequence
  Description of Artificial Sequence: Synthetic peptide
  2G4[CD28]_H1.12_L1.66 vlCDR1
RVSSSIQSTNLH

SEQ ID NO: 1173 - protein, 7 aa, Artificial Sequence
  Description of Artificial Sequence: Synthetic peptide
  2G4[CD28]_H1.12_L1.66 vlCDR2
GTSNLAT

SEQ ID NO: 1174 - protein, 10 aa, Artificial Sequence
  Description of Artificial Sequence: Synthetic peptide
  2G4[CD28]_H1.12_L1.66 vlCDR3
QQWSSYPLYT

SEQ ID NO: 1175 - protein, 118 aa, Artificial Sequence; identical to SEQ ID NO: 747
  Description of Artificial Sequence: Synthetic polypeptide
  2G4[CD28]_H1.12_L1.68 Variable Heavy (vh) Domain

SEQ ID NO: 1176 - protein, 5 aa, Artificial Sequence
  Description of Artificial Sequence: Synthetic peptide
  2G4[CD28]_H1.12_L1.68 vhCDR1
VYDMS

SEQ ID NO: 1177 - protein, 17 aa, Artificial Sequence
  Description of Artificial Sequence: Synthetic peptide
  2G4[CD28]_H1.12_L1.68 vhCDR2
TISSGGSFTHYPDSVKG

SEQ ID NO: 1178 - protein, 9 aa, Artificial Sequence
  Description of Artificial Sequence: Synthetic peptide
  2G4[CD28]_H1.12_L1.68 vhCDR3
RSLDWYFDV

SEQ ID NO: 1179 - protein, 109 aa, Artificial Sequence; identical to SEQ ID NO: 865
  Description of Artificial Sequence: Synthetic polypeptide
  2G4[CD28]_H1.12_L1.68 Variable Light (vl) Domain

SEQ ID NO: 1180 - protein, 12 aa, Artificial Sequence
  Description of Artificial Sequence: Synthetic peptide
  2G4[CD28]_H1.12_L1.68 vlCDR1
RVSSSIQSTNLH

SEQ ID NO: 1181 - protein, 7 aa, Artificial Sequence
  Description of Artificial Sequence: Synthetic peptide
  2G4[CD28]_H1.12_L1.68 vlCDR2
GTSNLAS

SEQ ID NO: 1182 - protein, 10 aa, Artificial Sequence
  Description of Artificial Sequence: Synthetic peptide
  2G4[CD28]_H1.12_L1.68 vlCDR3
QQWSSYPLYT

SEQ ID NO: 1183 - protein, 118 aa, Artificial Sequence; identical to SEQ ID NO: 747
  Description of Artificial Sequence: Synthetic polypeptide
  2G4[CD28]_H1.12_L1.14 Variable Heavy (vh) Domain

SEQ ID NO: 1184 - protein, 5 aa, Artificial Sequence
  Description of Artificial Sequence: Synthetic peptide
  2G4[CD28]_H1.12_L1.14 vhCDR1
VYDMS

SEQ ID NO: 1185 - protein, 17 aa, Artificial Sequence
  Description of Artificial Sequence: Synthetic peptide
  2G4[CD28]_H1.12_L1.14 vhCDR2
TISSGGSFTHYPDSVKG

SEQ ID NO: 1186 - protein, 9 aa, Artificial Sequence
  Description of Artificial Sequence: Synthetic peptide
  2G4[CD28]_H1.12_L1.14 vhCDR3
RSLDWYFDV

SEQ ID NO: 1187 - protein, 109 aa, Artificial Sequence; identical to SEQ ID NO: 811
  Description of Artificial Sequence: Synthetic polypeptide
  2G4[CD28]_H1.12_L1.14 Variable Light (vl) Domain

SEQ ID NO: 1188 - protein, 12 aa, Artificial Sequence
  Description of Artificial Sequence: Synthetic peptide
  2G4[CD28]_H1.12_L1.14 vlCDR1
RVSSSIQSSNLH

SEQ ID NO: 1189 - protein, 7 aa, Artificial Sequence
  Description of Artificial Sequence: Synthetic peptide
  2G4[CD28]_H1.12_L1.14 vlCDR2
GTSNLAS

SEQ ID NO: 1190 - protein, 10 aa, Artificial Sequence
  Description of Artificial Sequence: Synthetic peptide
  2G4[CD28]_H1.12_L1.14 vlCDR3
QQWSSYPLYT

SEQ ID NO: 1191 - protein, 118 aa, Artificial Sequence; identical to SEQ ID NO: 739
  Description of Artificial Sequence: Synthetic polypeptide
  2G4[CD28]_H1.4_L1.23 Variable Heavy (vh) Domain

SEQ ID NO: 1192 - protein, 5 aa, Artificial Sequence
  Description of Artificial Sequence: Synthetic peptide
  2G4[CD28]_H1.4_L1.23 vhCDR1
SYDMS

SEQ ID NO: 1193 - protein, 17 aa, Artificial Sequence
  Description of Artificial Sequence: Synthetic peptide
  2G4[CD28]_H1.4_L1.23 vhCDR2
TISSGGSFTHYPDSVKG

SEQ ID NO: 1194 - protein, 9 aa, Artificial Sequence
  Description of Artificial Sequence: Synthetic peptide
  2G4[CD28]_H1.4_L1.23 vhCDR3
RSLDWYFDV

SEQ ID NO: 1195 - protein, 109 aa, Artificial Sequence; identical to SEQ ID NO: 820
  Description of Artificial Sequence: Synthetic polypeptide
  2G4[CD28]_H1.4_L1.23 Variable Light (vl) Domain

SEQ ID NO: 1196 - protein, 12 aa, Artificial Sequence
  Description of Artificial Sequence: Synthetic peptide
  2G4[CD28]_H1.4_L1.23 vlCDR1
RVSLSIQSSNLH

SEQ ID NO: 1197 - protein, 7 aa, Artificial Sequence
  Description of Artificial Sequence: Synthetic peptide
  2G4[CD28]_H1.4_L1.23 vlCDR2
GTNLLAS

SEQ ID NO: 1198 - protein, 10 aa, Artificial Sequence
  Description of Artificial Sequence: Synthetic peptide
  2G4[CD28]_H1.4_L1.23 vlCDR3
QQWSSYPLYT

SEQ ID NO: 1199 - protein, 118 aa, Artificial Sequence; identical to SEQ ID NO: 739
  Description of Artificial Sequence: Synthetic polypeptide
  2G4[CD28]_H1.4_L1.24 Variable Heavy (vh) Domain

SEQ ID NO: 1200 - protein, 5 aa, Artificial Sequence
  Description of Artificial Sequence: Synthetic peptide
  2G4[CD28]_H1.4_L1.24 vhCDR1
SYDMS

SEQ ID NO: 1201 - protein, 17 aa, Artificial Sequence
  Description of Artificial Sequence: Synthetic peptide
  2G4[CD28]_H1.4_L1.24 vhCDR2
TISSGGSFTHYPDSVKG

SEQ ID NO: 1202 - protein, 9 aa, Artificial Sequence
  Description of Artificial Sequence: Synthetic peptide
  2G4[CD28]_H1.4_L1.24 vhCDR3
RSLDWYFDV

SEQ ID NO: 1203 - protein, 109 aa, Artificial Sequence; identical to SEQ ID NO: 821
  Description of Artificial Sequence: Synthetic polypeptide
  2G4[CD28]_H1.4_L1.24 Variable Light (vl) Domain

SEQ ID NO: 1204 - protein, 12 aa, Artificial Sequence
  Description of Artificial Sequence: Synthetic peptide
  2G4[CD28]_H1.4_L1.24 vlCDR1
RVSSSIQSTNLH

SEQ ID NO: 1205 - protein, 7 aa, Artificial Sequence
  Description of Artificial Sequence: Synthetic peptide
  2G4[CD28]_H1.4_L1.24 vlCDR2
GTSVLAT

SEQ ID NO: 1206 - protein, 10 aa, Artificial Sequence
  Description of Artificial Sequence: Synthetic peptide
  2G4[CD28]_H1.4_L1.24 vlCDR3
QQWSSYPLYT

SEQ ID NO: 1207 - protein, 118 aa, Artificial Sequence; identical to SEQ ID NO: 744
  Description of Artificial Sequence: Synthetic polypeptide
  2G4[CD28]_H1.9_L1 Variable Heavy (vh) Domain

SEQ ID NO: 1208 - protein, 5 aa, Artificial Sequence
  Description of Artificial Sequence: Synthetic peptide
  2G4[CD28]_H1.9_L1 vhCDR1
FRDMS

SEQ ID NO: 1209 - protein, 17 aa, Artificial Sequence
  Description of Artificial Sequence: Synthetic peptide
  2G4[CD28]_H1.9_L1 vhCDR2
TISSGGSFTHYPDSVKG

SEQ ID NO: 1210 - protein, 9 aa, Artificial Sequence
  Description of Artificial Sequence: Synthetic peptide
  2G4[CD28]_H1.9_L1 vhCDR3
RSGDWYFDV

SEQ ID NO: 1211 - protein, 109 aa, Artificial Sequence; identical to SEQ ID NO: 1046
  Description of Artificial Sequence: Synthetic polypeptide
  2G4[CD28]_H1.9_L1 Variable Light (vl) Domain

SEQ ID NO: 1212 - protein, 12 aa, Artificial Sequence
  Description of Artificial Sequence: Synthetic peptide
  2G4[CD28]_H1.9_L1 vlCDR1
RVSSSISSSNLH

SEQ ID NO: 1213 - protein, 7 aa, Artificial Sequence
  Description of Artificial Sequence: Synthetic peptide
  2G4[CD28]_H1.9_L1 vlCDR2
GTSNLAS

SEQ ID NO: 1214 - protein, 10 aa, Artificial Sequence
  Description of Artificial Sequence: Synthetic peptide
  2G4[CD28]_H1.9_L1 vlCDR3
QQWSSYPLYT

SEQ ID NO: 1215 - protein, 118 aa, Artificial Sequence; identical to SEQ ID NO: 797
  Description of Artificial Sequence: Synthetic polypeptide
  2G4[CD28]_H1.62_L1.63 Variable Heavy (vh) Domain

SEQ ID NO: 1216 - protein, 5 aa, Artificial Sequence
  Description of Artificial Sequence: Synthetic peptide
  2G4[CD28]_H1.62_L1.63 vhCDR1
SYDMS

SEQ ID NO: 1217 - protein, 17 aa, Artificial Sequence
  Description of Artificial Sequence: Synthetic peptide
  2G4[CD28]_H1.62_L1.63 vhCDR2
TISSGGSFTHYPDSVKG

SEQ ID NO: 1218 - protein, 9 aa, Artificial Sequence
  Description of Artificial Sequence: Synthetic peptide
  2G4[CD28]_H1.62_L1.63 vhCDR3
RSGDWYFDV

SEQ ID NO: 1219 - protein, 109 aa, Artificial Sequence; identical to SEQ ID NO: 860
  Description of Artificial Sequence: Synthetic polypeptide
  2G4[CD28]_H1.62_L1.63 Variable Light (vl) Domain

SEQ ID NO: 1220 - protein, 12 aa, Artificial Sequence
  Description of Artificial Sequence: Synthetic peptide
  2G4[CD28]_H1.62_L1.63 vlCDR1
RASSSISSSNLH

SEQ ID NO: 1221 - protein, 7 aa, Artificial Sequence
  Description of Artificial Sequence: Synthetic peptide
  2G4[CD28]_H1.62_L1.63 vlCDR2
GTSNLAS

SEQ ID NO: 1222 - protein, 10 aa, Artificial Sequence
  Description of Artificial Sequence: Synthetic peptide
  2G4[CD28]_H1.62_L1.63 vlCDR3
QQWSSYPLYT

SEQ ID NO: 1223 - protein, 118 aa, Artificial Sequence; identical to SEQ ID NO: 741
  Description of Artificial Sequence: Synthetic polypeptide
  2G4[CD28]_H1.6_L1.3 Variable Heavy (vh) Domain

SEQ ID NO: 1224 - protein, 5 aa, Artificial Sequence
  Description of Artificial Sequence: Synthetic peptide
  2G4[CD28]_H1.6_L1.3 vhCDR1
SRDMS

SEQ ID NO: 1225 - protein, 17 aa, Artificial Sequence
  Description of Artificial Sequence: Synthetic peptide
  2G4[CD28]_H1.6_L1.3 vhCDR2
TISSGGRFTHYPDSVKG

SEQ ID NO: 1226 - protein, 9 aa, Artificial Sequence
  Description of Artificial Sequence: Synthetic peptide
  2G4[CD28]_H1.6_L1.3 vhCDR3
RSGDWYFDV

SEQ ID NO: 1227 - protein, 109 aa, Artificial Sequence; identical to SEQ ID NO: 800
  Description of Artificial Sequence: Synthetic polypeptide
  2G4[CD28]_H1.6_L1.3 Variable Light (vl) Domain

SEQ ID NO: 1228 - protein, 12 aa, Artificial Sequence
  Description of Artificial Sequence: Synthetic peptide
  2G4[CD28]_H1.6_L1.3 vlCDR1
RVSSSISSSNLH

SEQ ID NO: 1229 - protein, 7 aa, Artificial Sequence
  Description of Artificial Sequence: Synthetic peptide
  2G4[CD28]_H1.6_L1.3 vlCDR2
GTSNLAS

SEQ ID NO: 1230 - protein, 10 aa, Artificial Sequence
  Description of Artificial Sequence: Synthetic peptide
  2G4[CD28]_H1.6_L1.3 vlCDR3
QQWSSYPLWT

SEQ ID NO: 1231 - protein, 118 aa, Artificial Sequence; identical to SEQ ID NO: 796
  Description of Artificial Sequence: Synthetic polypeptide
  2G4[CD28]_H1.61_L1.61 Variable Heavy (vh) Domain

SEQ ID NO: 1232 - protein, 5 aa, Artificial Sequence
  Description of Artificial Sequence: Synthetic peptide
  2G4[CD28]_H1.61_L1.61 vhCDR1
SYDMS

SEQ ID NO: 1233 - protein, 17 aa, Artificial Sequence
  Description of Artificial Sequence: Synthetic peptide
  2G4[CD28]_H1.61_L1.61 vhCDR2
TISSGGSFTHYPDSVKG

SEQ ID NO: 1234 - protein, 9 aa, Artificial Sequence
  Description of Artificial Sequence: Synthetic peptide
  2G4[CD28]_H1.61_L1.61 vhCDR3
RSLDWYFDV

SEQ ID NO: 1235 - protein, 109 aa, Artificial Sequence; identical to SEQ ID NO: 858
  Description of Artificial Sequence: Synthetic polypeptide
  2G4[CD28]_H1.61_L1.61 Variable Light (vl) Domain

SEQ ID NO: 1236 - protein, 12 aa, Artificial Sequence
  Description of Artificial Sequence: Synthetic peptide
  2G4[CD28]_H1.61_L1.61 vlCDR1
RASLSIQSSNLH

SEQ ID NO: 1237 - protein, 7 aa, Artificial Sequence
  Description of Artificial Sequence: Synthetic peptide
  2G4[CD28]_H1.61_L1.61 vlCDR2
GTNLLAS

SEQ ID NO: 1238 - protein, 10 aa, Artificial Sequence
  Description of Artificial Sequence: Synthetic peptide
  2G4[CD28]_H1.61_L1.61 vlCDR3
QQWSSYPLYT

SEQ ID NO: 1239 - protein, 118 aa, Artificial Sequence; identical to SEQ ID NO: 795
  Description of Artificial Sequence: Synthetic polypeptide
  2G4[CD28]_H1.60_L1.60 Variable Heavy (vh) Domain

SEQ ID NO: 1240 - protein, 5 aa, Artificial Sequence
  Description of Artificial Sequence: Synthetic peptide
  2G4[CD28]_H1.60_L1.60 vhCDR1
SSDMS

SEQ ID NO: 1241 - protein, 17 aa, Artificial Sequence
  Description of Artificial Sequence: Synthetic peptide
  2G4[CD28]_H1.60_L1.60 vhCDR2
TISSGGSFTHYPDSVKG

SEQ ID NO: 1242 - protein, 9 aa, Artificial Sequence
  Description of Artificial Sequence: Synthetic peptide
  2G4[CD28]_H1.60_L1.60 vhCDR3
RSLDWYFDV

SEQ ID NO: 1243 - protein, 109 aa, Artificial Sequence; identical to SEQ ID NO: 857
  Description of Artificial Sequence: Synthetic polypeptide
  2G4[CD28]_H1.60_L1.60 Variable Light (vl) Domain

SEQ ID NO: 1244 - protein, 12 aa, Artificial Sequence
  Description of Artificial Sequence: Synthetic peptide
  2G4[CD28]_H1.60_L1.60 vlCDR1
RASSSISSSNLH

SEQ ID NO: 1245 - protein, 7 aa, Artificial Sequence
  Description of Artificial Sequence: Synthetic peptide
  2G4[CD28]_H1.60_L1.60 vlCDR2
GTSNLAS

SEQ ID NO: 1246 - protein, 10 aa, Artificial Sequence
  Description of Artificial Sequence: Synthetic peptide
  2G4[CD28]_H1.60_L1.60 vlCDR3
QQWSSYPLWT

SEQ ID NO: 1247 - protein, 118 aa, Artificial Sequence; identical to SEQ ID NO: 794
  Description of Artificial Sequence: Synthetic polypeptide
  2G4[CD28]_H1.59_L1.60 Variable Heavy (vh) Domain

SEQ ID NO: 1248 - protein, 5 aa, Artificial Sequence
  Description of Artificial Sequence: Synthetic peptide
  2G4[CD28]_H1.59_L1.60 vhCDR1
SRDMS

SEQ ID NO: 1249 - protein, 17 aa, Artificial Sequence
  Description of Artificial Sequence: Synthetic peptide
  2G4[CD28]_H1.59_L1.60 vhCDR2
TISSGGRFTHYPDSVKG

SEQ ID NO: 1250 - protein, 9 aa, Artificial Sequence
  Description of Artificial Sequence: Synthetic peptide
  2G4[CD28]_H1.59_L1.60 vhCDR3
RSGDWYFDV

SEQ ID NO: 1251 - protein, 109 aa, Artificial Sequence; identical to SEQ ID NO: 857
  Description of Artificial Sequence: Synthetic polypeptide
  2G4[CD28]_H1.59_L1.60 Variable Light (vl) Domain

SEQ ID NO: 1252 - protein, 12 aa, Artificial Sequence
  Description of Artificial Sequence: Synthetic peptide
  2G4[CD28]_H1.59_L1.60 vlCDR1
RASSSISSSNLH

SEQ ID NO: 1253 - protein, 7 aa, Artificial Sequence
  Description of Artificial Sequence: Synthetic peptide
  2G4[CD28]_H1.59_L1.60 vlCDR2
GTSNLAS

SEQ ID NO: 1254 - protein, 10 aa, Artificial Sequence
  Description of Artificial Sequence: Synthetic peptide
  2G4[CD28]_H1.59_L1.60 vlCDR3
QQWSSYPLWT

SEQ ID NO: 1255 - protein, 118 aa, Artificial Sequence; identical to SEQ ID NO: 749
  Description of Artificial Sequence: Synthetic polypeptide
  2G4[CD28]_H1.14_L1.26 Variable Heavy (vh) Domain

SEQ ID NO: 1256 - protein, 5 aa, Artificial Sequence
  Description of Artificial Sequence: Synthetic peptide
  2G4[CD28]_H1.14_L1.26 vhCDR1
SSDMS

SEQ ID NO: 1257 - protein, 17 aa, Artificial Sequence
  Description of Artificial Sequence: Synthetic peptide
  2G4[CD28]_H1.14_L1.26 vhCDR2
TISSGGSFTHYPDSVKG

SEQ ID NO: 1258 - protein, 9 aa, Artificial Sequence
  Description of Artificial Sequence: Synthetic peptide
  2G4[CD28]_H1.14_L1.26 vhCDR3
RSLDWYFDV

SEQ ID NO: 1259 - protein, 109 aa, Artificial Sequence; identical to SEQ ID NO: 823
  Description of Artificial Sequence: Synthetic polypeptide
  2G4[CD28]_H1.14_L1.26 Variable Light (vl) Domain

SEQ ID NO: 1260 - protein, 12 aa, Artificial Sequence
  Description of Artificial Sequence: Synthetic peptide
  2G4[CD28]_H1.14_L1.26 vlCDR1
RASSSIQDSNLH

SEQ ID NO: 1261 - protein, 7 aa, Artificial Sequence
  Description of Artificial Sequence: Synthetic peptide
  2G4[CD28]_H1.14_L1.26 vlCDR2
GTSNLRS

SEQ ID NO: 1262 - protein, 10 aa, Artificial Sequence
  Description of Artificial Sequence: Synthetic peptide
  2G4[CD28]_H1.14_L1.26 vlCDR3
QQWSSYPLYT

SEQ ID NO: 1263 - protein, 118 aa, Artificial Sequence; identical to SEQ ID NO: 1042
  Description of Artificial Sequence: Synthetic polypeptide
  2G4[CD28]_H1_L1.27 Variable Heavy (vh) Domain

SEQ ID NO: 1264 - protein, 5 aa, Artificial Sequence
  Description of Artificial Sequence: Synthetic peptide
  2G4[CD28]_H1_L1.27 vhCDR1
SYDMS

SEQ ID NO: 1265 - protein, 17 aa, Artificial Sequence
  Description of Artificial Sequence: Synthetic peptide
  2G4[CD28]_H1_L1.27 vhCDR2
TISSGGSFTHYPDSVKG

SEQ ID NO: 1266 - protein, 9 aa, Artificial Sequence
  Description of Artificial Sequence: Synthetic peptide
  2G4[CD28]_H1_L1.27 vhCDR3
RSGDWYFDV

SEQ ID NO: 1267 - protein, 109 aa, Artificial Sequence; identical to SEQ ID NO: 824
  Description of Artificial Sequence: Synthetic polypeptide
  2G4[CD28]_H1_L1.27 Variable Light (vl) Domain

SEQ ID NO: 1268 - protein, 12 aa, Artificial Sequence
  Description of Artificial Sequence: Synthetic peptide
  2G4[CD28]_H1_L1.27 vlCDR1
RVSSSIQGSNLH

SEQ ID NO: 1269 - protein, 7 aa, Artificial Sequence
  Description of Artificial Sequence: Synthetic peptide
  2G4[CD28]_H1_L1.27 vlCDR2
GTSNLAS

SEQ ID NO: 1270 - protein, 10 aa, Artificial Sequence
  Description of Artificial Sequence: Synthetic peptide
  2G4[CD28]_H1_L1.27 vlCDR3
QQWSSYPLYT

SEQ ID NO: 1271 - protein, 118 aa, Artificial Sequence; identical to SEQ ID NO: 743
  Description of Artificial Sequence: Synthetic polypeptide
  2G4[CD28]_H1.8_L1.26 Variable Heavy (vh) Domain

SEQ ID NO: 1272 - protein, 5 aa, Artificial Sequence
  Description of Artificial Sequence: Synthetic peptide
  2G4[CD28]_H1.8_L1.26 vhCDR1
SSDMS

SEQ ID NO: 1273 - protein, 17 aa, Artificial Sequence
  Description of Artificial Sequence: Synthetic peptide
  2G4[CD28]_H1.8_L1.26 vhCDR2
TISSGGSFTHYPDSVKG

SEQ ID NO: 1274 - protein, 9 aa, Artificial Sequence
  Description of Artificial Sequence: Synthetic peptide
  2G4[CD28]_H1.8_L1.26 vhCDR3
RSGDWYFDV

SEQ ID NO: 1275 - protein, 109 aa, Artificial Sequence; identical to SEQ ID NO: 823
  Description of Artificial Sequence: Synthetic polypeptide
  2G4[CD28]_H1.8_L1.26 Variable Light (vl) Domain

SEQ ID NO: 1276 - protein, 12 aa, Artificial Sequence
  Description of Artificial Sequence: Synthetic peptide
  2G4[CD28]_H1.8_L1.26 vlCDR1
RASSSIQDSNLH

SEQ ID NO: 1277 - protein, 7 aa, Artificial Sequence
  Description of Artificial Sequence: Synthetic peptide
  2G4[CD28]_H1.8_L1.26 vlCDR2
GTSNLRS

SEQ ID NO: 1278 - protein, 10 aa, Artificial Sequence
  Description of Artificial Sequence: Synthetic peptide
  2G4[CD28]_H1.8_L1.26 vlCDR3
QQWSSYPLYT

SEQ ID NO: 1279 - protein, 118 aa, Artificial Sequence; identical to SEQ ID NO: 1042
  Description of Artificial Sequence: Synthetic polypeptide
  2G4[CD28]_H1_L1.25 Variable Heavy (vh) Domain

SEQ ID NO: 1280 - protein, 5 aa, Artificial Sequence
  Description of Artificial Sequence: Synthetic peptide
  2G4[CD28]_H1_L1.25 vhCDR1
SYDMS

SEQ ID NO: 1281 - protein, 17 aa, Artificial Sequence
  Description of Artificial Sequence: Synthetic peptide
  2G4[CD28]_H1_L1.25 vhCDR2
TISSGGSFTHYPDSVKG

SEQ ID NO: 1282 - protein, 9 aa, Artificial Sequence
  Description of Artificial Sequence: Synthetic peptide
  2G4[CD28]_H1_L1.25 vhCDR3
RSGDWYFDV

SEQ ID NO: 1283 - protein, 109 aa, Artificial Sequence; identical to SEQ ID NO: 822
  Description of Artificial Sequence: Synthetic polypeptide
  2G4[CD28]_H1_L1.25 Variable Light (vl) Domain

SEQ ID NO: 1284 - protein, 12 aa, Artificial Sequence
  Description of Artificial Sequence: Synthetic peptide
  2G4[CD28]_H1_L1.25 vlCDR1
RVSSSIQPSNLH

SEQ ID NO: 1285 - protein, 7 aa, Artificial Sequence
  Description of Artificial Sequence: Synthetic peptide
  2G4[CD28]_H1_L1.25 vlCDR2
GTSNLAS

SEQ ID NO: 1286 - protein, 10 aa, Artificial Sequence
  Description of Artificial Sequence: Synthetic peptide
  2G4[CD28]_H1_L1.25 vlCDR3
QQWSSYPLYT

SEQ ID NO: 1287 - protein, 118 aa, Artificial Sequence; identical to SEQ ID NO: 745
  Description of Artificial Sequence: Synthetic polypeptide
  2G4[CD28]_H1.10_L1.23 Variable Heavy (vh) Domain

SEQ ID NO: 1288 - protein, 5 aa, Artificial Sequence
  Description of Artificial Sequence: Synthetic peptide
  2G4[CD28]_H1.10_L1.23 vhCDR1
WYDMS

SEQ ID NO: 1289 - protein, 17 aa, Artificial Sequence
  Description of Artificial Sequence: Synthetic peptide
  2G4[CD28]_H1.10_L1.23 vhCDR2
TISSGGSFTHYPDSVKG

SEQ ID NO: 1290 - protein, 9 aa, Artificial Sequence
  Description of Artificial Sequence: Synthetic peptide
  2G4[CD28]_H1.10_L1.23 vhCDR3
RSGDWYFDV

SEQ ID NO: 1291 - protein, 109 aa, Artificial Sequence; identical to SEQ ID NO: 820
  Description of Artificial Sequence: Synthetic polypeptide
  2G4[CD28]_H1.10_L1.23 Variable Light (vl) Domain

SEQ ID NO: 1292 - protein, 12 aa, Artificial Sequence
  Description of Artificial Sequence: Synthetic peptide
  2G4[CD28]_H1.10_L1.23 vlCDR1
RVSLSIQSSNLH

SEQ ID NO: 1293 - protein, 7 aa, Artificial Sequence
  Description of Artificial Sequence: Synthetic peptide
  2G4[CD28]_H1.10_L1.23 vlCDR2
GTNLLAS

SEQ ID NO: 1294 - protein, 10 aa, Artificial Sequence
  Description of Artificial Sequence: Synthetic peptide
  2G4[CD28]_H1.10_L1.23 vlCDR3
QQWSSYPLYT

SEQ ID NO: 1295 - protein, 118 aa, Artificial Sequence; identical to SEQ ID NO: 736
  Description of Artificial Sequence: Synthetic polypeptide
  2G4[CD28]_H1.1_L1.1 Variable Heavy (vh) Domain

SEQ ID NO: 1296 - protein, 5 aa, Artificial Sequence
  Description of Artificial Sequence: Synthetic peptide
  2G4[CD28]_H1.1_L1.1 vhCDR1
SRDMS

SEQ ID NO: 1297 - protein, 17 aa, Artificial Sequence
  Description of Artificial Sequence: Synthetic peptide
  2G4[CD28]_H1.1_L1.1 vhCDR2
TISSGGSFTHYPDSVKG

SEQ ID NO: 1298 - protein, 9 aa, Artificial Sequence
  Description of Artificial Sequence: Synthetic peptide
  2G4[CD28]_H1.1_L1.1 vhCDR3
RSGDWYFDV

SEQ ID NO: 1299 - protein, 109 aa, Artificial Sequence; identical to SEQ ID NO: 798
  Description of Artificial Sequence: Synthetic polypeptide
  2G4[CD28]_H1.1_L1.1 Variable Light (vl) Domain

SEQ ID NO: 1300 - protein, 12 aa, Artificial Sequence
  Description of Artificial Sequence: Synthetic peptide
  2G4[CD28]_H1.1_L1.1 vlCDR1
RVSSSISSSNLH

SEQ ID NO: 1301 - protein, 7 aa, Artificial Sequence
  Description of Artificial Sequence: Synthetic peptide
  2G4[CD28]_H1.1_L1.1 vlCDR2
GTSNLAS

SEQ ID NO: 1302 - protein, 10 aa, Artificial Sequence
  Description of Artificial Sequence: Synthetic peptide
  2G4[CD28]_H1.1_L1.1 vlCDR3
QQWWSYPLYT

SEQ ID NO: 1303 - protein, 118 aa, Artificial Sequence; identical to SEQ ID NO: 1042
  Description of Artificial Sequence: Synthetic polypeptide
  2G4[CD28]_H1_L1.29 Variable Heavy (vh) Domain

SEQ ID NO: 1304 - protein, 5 aa, Artificial Sequence
  Description of Artificial Sequence: Synthetic peptide
  2G4[CD28]_H1_L1.29 vhCDR1
SYDMS

SEQ ID NO: 1305 - protein, 17 aa, Artificial Sequence
  Description of Artificial Sequence: Synthetic peptide
  2G4[CD28]_H1_L1.29 vhCDR2
TISSGGSFTHYPDSVKG

SEQ ID NO: 1306 - protein, 9 aa, Artificial Sequence
  Description of Artificial Sequence: Synthetic peptide
  2G4[CD28]_H1_L1.29 vhCDR3
RSGDWYFDV

SEQ ID NO: 1307 - protein, 109 aa, Artificial Sequence; identical to SEQ ID NO: 826
  Description of Artificial Sequence: Synthetic polypeptide
  2G4[CD28]_H1_L1.29 Variable Light (vl) Domain

SEQ ID NO: 1308 - protein, 12 aa, Artificial Sequence
  Description of Artificial Sequence: Synthetic peptide
  2G4[CD28]_H1_L1.29 vlCDR1
RVSSRIVLSNLH

SEQ ID NO: 1309 - protein, 7 aa, Artificial Sequence
  Description of Artificial Sequence: Synthetic peptide
  2G4[CD28]_H1_L1.29 vlCDR2
GTSVLAT

SEQ ID NO: 1310 - protein, 10 aa, Artificial Sequence
  Description of Artificial Sequence: Synthetic peptide
  2G4[CD28]_H1_L1.29 vlCDR3
QQWSSYPLWT

SEQ ID NO: 1311 - protein, 449 aa, Artificial Sequence
  Description of Artificial Sequence: Synthetic polypeptide
  XENP34963 Chain 1 - avelumab[PD-L1]_H1_IgG1_pI(-)_Isosteric_A_/P VA_/S267K/L368D/K370S
EVQLLESGGGLVQPGGSLRLSCAASGFTFSSYIMMWVRQAPGKGLEWVSSIYPSGGITFYADTVKGRFTISRDNSKNTLYLQMNSLRAEDTAVYYCARIKLGTVTTVDYWGQGTLVTVSSASTKGPSVFPLAPSSKSTSGGTAALGCLVKDYFPEPVTVSWNSGALTSGVHTFPAVLQSSGLYSLSSVVTVPSSSLGTQTYICNVNHKPSDTKVDKKVEPKSCDKTHTCPPCPAPPVAGPSVFLFPPKPKDTLMISRTPEVTCVVVDVKHEDPEVKFNWYVDGVEVHNAKTKPREEEYNSTYRVVSVLTVLHQDWLNGKEYKCKVSNKALPAPIEKTISKAKGQPREPQVYTLPPSREEMTKNQVSLTCDVSGFYPSDIAVEWESDGQPENNYKTTPPVLDSDGSFFLYSKLTVDKSRWEQGDVFSCSVMHEALHNHYTQKSLSLSPGK

SEQ ID NO: 1312 - protein, 479 aa, Artificial Sequence
  Description of Artificial Sequence: Synthetic polypeptide
  XENP34963 Chain 2 - 1A7[CD28]_H1.14_L1_scFv(GKPGS)4_Fc(216)_IgG1 _C220S/PVA_/S267K/S364K/E357Q
EVQLLESGGGLVQPGGSLRLSCAASGFTFSSYYMSWVRQAPGKGLEWVSTISESGDSTYYADSVKGRFTISRDNSKNTLYLQMNSLRAEDTAVYYCAKSGPGLRQVGFDYWGQGTLVTVSSGKPGSGKPGSGKPGSGKPGSDIQMTQSPSSLSASVGDRVTITCRASQSISSYLNWYQQKPGKAPKLLIYAASSLQSGVPSRFSGSGSGTDFTLTISSLQPEDFATYYCQQSYSTPFTFGQGTKLEIKEPKSSDKTHTCPPCPAPPVAGPSVFLFPPKPKDTLMISRTPEVTCVVVDVKHEDPEVKFNWYVDGVEVHNAKTKPREEQYNSTYRVVSVLTVLHQDWLNGKEYKCKVSNKALPAPIEKTISKAKGQPREPQVYTLPPSREQMTKNQVKLTCLVKGFYPSDIAVEWESNGQPENNYKTTPPVLDSDGSFFLYSKLTVDKSRWQQGNVFSCSVMHEALHNHYTQKSLSLSPGK

SEQ ID NO: 1313 - protein, 216 aa, Artificial Sequence
  Description of Artificial Sequence: Synthetic polypeptide
  XENP34963 Chain 3 - avelumab[PD-L1]_L1 Light Chain
QSALTQPASVSGSPGQSITISCTGTSSDVGGYNYVSWYQQHPGKAPKLMIYDVSNRPSGVSNRFSGSKSGNTASLTISGLQAEDEADYYCSSYTSSSTRVFGTGTKVTVLGQPKAAPSVTLFPPSSEELQANKATLVCLISDFYPGAVTVAWKADSSPVKAGVETTTPSKQSNNKYAASSYLSLTPEQWKSHRSYSCQVTHEGSTVEKTVAPTECS

SEQ ID NO: 1314 - protein, 447 aa, Artificial Sequence; identical to SEQ ID NO: 1052
  Description of Artificial Sequence: Synthetic polypeptide
  XENP36233 Chain 1 - 2G4[PD-L1]_H1_IgG1_pI(-)_Isosteric_A_/PVA_/S 267K/L368D/K370S

SEQ ID NO: 1315 - protein, 479 aa, Artificial Sequence; identical to SEQ ID NO: 1312
  Description of Artificial Sequence: Synthetic polypeptide
  XENP36233 Chain 2 - 1A7[CD28]_H1.14_L1_scFv(GKPGS)4_Fc(216)_IgG1 _C220S/PVA_/S267K/S364K/E357Q

SEQ ID NO: 1316 - protein, 216 aa, Artificial Sequence; identical to SEQ ID NO: 1051
  Description of Artificial Sequence: Synthetic polypeptide
  XENP36233 Chain 3 - 2G4[PD-L1]_L1 Light Chain

SEQ ID NO: 1317 - protein, 447 aa, Artificial Sequence
  Description of Artificial Sequence: Synthetic polypeptide
  XENP36764 Chain 1 - 2G4[PD-L1]_H1_IgG1_pI(-)_Isosteric_A_/PVA_/S 267K/L368D/K370S/M428L/N434S
EVQLLESGGGLVQPGGSLRLSCAASGFTFSSYDMSWVRQAPGKRLEWVSTISSGGSFTHYPDSVKGRFTISRDNSKNTLYLQMNSLRAEDTAVYYCVRRSGDWYFDVWGAGTTVTVSSASTKGPSVFPLAPSSKSTSGGTAALGCLVKDYFPEPVTVSWNSGALTSGVHTFPAVLQSSGLYSLSSVVTVPSSSLGTQTYICNVNHKPSDTKVDKKVEPKSCDKTHTCPPCPAPPVAGPSVFLFPPKPKDTLMISRTPEVTCVVVDVKHEDPEVKFNWYVDGVEVHNAKTKPREEEYNSTYRVVSVLTVLHQDWLNGKEYKCKVSNKALPAPIEKTISKAKGQPREPQVYTLPPSREEMTKNQVSLTCDVSGFYPSDIAVEWESDGQPENNYKTTPPVLDSDGSFFLYSKLTVDKSRWEQGDVFSCSVLHEALHSHYTQKSLSLSPGK

SEQ ID NO: 1318 - protein, 479 aa, Artificial Sequence
  Description of Artificial Sequence: Synthetic polypeptide
  XENP36764 Chain 2 - 1A7[CD28]_H1.14_L1_scFv(GKPGS)4_Fc(216)_IgG1 _C220S/PVA_/S267K/S364K/E357Q/M428L/N434S
EVQLLESGGGLVQPGGSLRLSCAASGFTFSSYYMSWVRQAPGKGLEWVSTISESGDSTYYADSVKGRFTISRDNSKNTLYLQMNSLRAEDTAVYYCAKSGPGLRQVGFDYWGQGTLVTVSSGKPGSGKPGSGKPGSGKPGSDIQMTQSPSSLSASVGDRVTITCRASQSISSYLNWYQQKPGKAPKLLIYAASSLQSGVPSRFSGSGSGTDFTLTISSLQPEDFATYYCQQSYSTPFTFGQGTKLEIKEPKSSDKTHTCPPCPAPPVAGPSVFLFPPKPKDTLMISRTPEVTCVVVDVKHEDPEVKFNWYVDGVEVHNAKTKPREEQYNSTYRVVSVLTVLHQDWLNGKEYKCKVSNKALPAPIEKTISKAKGQPREPQVYTLPPSREQMTKNQVKLTCLVKGFYPSDIAVEWESNGQPENNYKTTPPVLDSDGSFFLYSKLTVDKSRWQQGNVFSCSVLHEALHSHYTQKSLSLSPGK

SEQ ID NO: 1319 - protein, 216 aa, Artificial Sequence; identical to SEQ ID NO: 1051
  Description of Artificial Sequence: Synthetic polypeptide
  XENP36764 Chain 3 - 2G4[PD-L1]_L1 Light Chain

SEQ ID NO: 1320 - protein, 447 aa, Artificial Sequence; identical to SEQ ID NO: 1052
  Description of Artificial Sequence: Synthetic polypeptide
  XENP37261 Chain 1 - 2G4[PD-L1]_H1_IgG1_pI(-)_Isosteric_A_/PVA_/S 267K/L368D/K370S

SEQ ID NO: 1321 - protein, 479 aa, Artificial Sequence
  Description of Artificial Sequence: Synthetic polypeptide
  XENP37261 Chain 2 - 1A7[CD28]_H1.14_L1.71_scFv(GKPGS)4_Fc(216)_I gG1_C220S/PVA_/S267K/S364K/E357Q
EVQLLESGGGLVQPGGSLRLSCAASGFTFSSYYMSWVRQAPGKGLEWVSTISESGDSTYYADSVKGRFTISRDNSKNTLYLQMNSLRAEDTAVYYCAKSGPGLRQVGFDYWGQGTLVTVSSGKPGSGKPGSGKPGSGKPGSDIQMTQSPSSLSASVGDRVTITCRASQSISSYLNWYQQKPGKAPKLLIYAASSLQSGVPSRFSGSGSGTDFTLTISSLQPEDFATYYCQQVYSTPFTFGQGTKLEIKEPKSSDKTHTCPPCPAPPVAGPSVFLFPPKPKDTLMISRTPEVTCVVVDVKHEDPEVKFNWYVDGVEVHNAKTKPREEQYNSTYRVVSVLTVLHQDWLNGKEYKCKVSNKALPAPIEKTISKAKGQPREPQVYTLPPSREQMTKNQVKLTCLVKGFYPSDIAVEWESNGQPENNYKTTPPVLDSDGSFFLYSKLTVDKSRWQQGNVFSCSVMHEALHNHYTQKSLSLSPGK

SEQ ID NO: 1322 - protein, 216 aa, Artificial Sequence; identical to SEQ ID NO: 1051
  Description of Artificial Sequence: Synthetic polypeptide
  XENP37261 Chain 3 - 2G4[PD-L1]_L1

SEQ ID NO: 1323 - protein, 447 aa, Artificial Sequence; identical to SEQ ID NO: 1317
  Description of Artificial Sequence: Synthetic polypeptide
  XENP37302 Chain 1 - 2G4[PD-L1]_H1_IgG1_pI(-)_Isosteric_A_/PVA_/S 267K/L368D/K370S/M428L/N434S

SEQ ID NO: 1324 - protein, 479 aa, Artificial Sequence
  Description of Artificial Sequence: Synthetic polypeptide
  XENP37302 Chain 2 - 1A7[CD28]_H1.14_L1.71_scFv(GKPGS)4_Fc(216)_I gG1_C220S/PVA_/S267K/S364K/E357Q/M428L/N434S
EVQLLESGGGLVQPGGSLRLSCAASGFTFSSYYMSWVRQAPGKGLEWVSTISESGDSTYYADSVKGRFTISRDNSKNTLYLQMNSLRAEDTAVYYCAKSGPGLRQVGFDYWGQGTLVTVSSGKPGSGKPGSGKPGSGKPGSDIQMTQSPSSLSASVGDRVTITCRASQSISSYLNWYQQKPGKAPKLLIYAASSLQSGVPSRFSGSGSGTDFTLTISSLQPEDFATYYCQQVYSTPFTFGQGTKLEIKEPKSSDKTHTCPPCPAPPVAGPSVFLFPPKPKDTLMISRTPEVTCVVVDVKHEDPEVKFNWYVDGVEVHNAKTKPREEQYNSTYRVVSVLTVLHQDWLNGKEYKCKVSNKALPAPIEKTISKAKGQPREPQVYTLPPSREQMTKNQVKLTCLVKGFYPSDIAVEWESNGQPENNYKTTPPVLDSDGSFFLYSKLTVDKSRWQQGNVFSCSVLHEALHSHYTQKSLSLSPGK

SEQ ID NO: 1325 - protein, 216 aa, Artificial Sequence; identical to SEQ ID NO: 1051
  Description of Artificial Sequence: Synthetic polypeptide
  XENP37302 Chain 3 - 2G4[PD-L1]_L1 Light Chain

SEQ ID NO: 1326 - protein, 447 aa, Artificial Sequence; identical to SEQ ID NO: 1052
  Description of Artificial Sequence: Synthetic polypeptide
  XENP37412 Chain 1 - 2G4[PD-L1]_H1_IgG1_pI(-)_Isosteric_A_/PVA_/S 267K/L368D/K370S

SEQ ID NO: 1327 - protein, 479 aa, Artificial Sequence
  Description of Artificial Sequence: Synthetic polypeptide
  XENP37412 Chain 2 - 1A7[CD28]_L1_H1.14_scFv(GKPGS)4_Fc(216)_IgG1 _C220S/PVA_/S267K/S364K/E357Q
DIQMTQSPSSLSASVGDRVTITCRASQSISSYLNWYQQKPGKAPKLLIYAASSLQSGVPSRFSGSGSGTDFTLTISSLQPEDFATYYCQQSYSTPFTFGQGTKLEIKGKPGSGKPGSGKPGSGKPGSEVQLLESGGGLVQPGGSLRLSCAASGFTFSSYYMSWVRQAPGKGLEWVSTISESGDSTYYADSVKGRFTISRDNSKNTLYLQMNSLRAEDTAVYYCAKSGPGLRQVGFDYWGQGTLVTVSSEPKSSDKTHTCPPCPAPPVAGPSVFLFPPKPKDTLMISRTPEVTCVVVDVKHEDPEVKFNWYVDGVEVHNAKTKPREEQYNSTYRVVSVLTVLHQDWLNGKEYKCKVSNKALPAPIEKTISKAKGQPREPQVYTLPPSREQMTKNQVKLTCLVKGFYPSDIAVEWESNGQPENNYKTTPPVLDSDGSFFLYSKLTVDKSRWQQGNVFSCSVMHEALHNHYTQKSLSLSPGK

SEQ ID NO: 1328 - protein, 216 aa, Artificial Sequence; identical to SEQ ID NO: 1051
  Description of Artificial Sequence: Synthetic polypeptide
  XENP37412 Chain 3 - 2G4[PD-L1]_L1

SEQ ID NO: 1329 - protein, 447 aa, Artificial Sequence; identical to SEQ ID NO: 1052
  Description of Artificial Sequence: Synthetic polypeptide
  XENP37559 Chain 1 - 2G4[PD-L1]_H1_IgG1_pI(-)_Isosteric_A_/PVA_/S 267K/L368D/K370S

SEQ ID NO: 1330 - protein, 479 aa, Artificial Sequence
  Description of Artificial Sequence: Synthetic polypeptide
  XENP37559 Chain 2 - 1A7[CD28]_H1_L1.71_scFv(GKPGS)4_Fc(216)_IgG1 _C220S/PVA_/S267K/S364K/E357Q
EVQLLESGGGLVQPGGSLRLSCAASGFTFSSYAMSWVRQAPGKGLEWVSTISGSGDSTYYADSVKGRFTISRDNSKNTLYLQMNSLRAEDTAVYYCAKSGPGLRQVGFDYWGQGTLVTVSSGKPGSGKPGSGKPGSGKPGSDIQMTQSPSSLSASVGDRVTITCRASQSISSYLNWYQQKPGKAPKLLIYAASSLQSGVPSRFSGSGSGTDFTLTISSLQPEDFATYYCQQVYSTPFTFGQGTKLEIKEPKSSDKTHTCPPCPAPPVAGPSVFLFPPKPKDTLMISRTPEVTCVVVDVKHEDPEVKFNWYVDGVEVHNAKTKPREEQYNSTYRVVSVLTVLHQDWLNGKEYKCKVSNKALPAPIEKTISKAKGQPREPQVYTLPPSREQMTKNQVKLTCLVKGFYPSDIAVEWESNGQPENNYKTTPPVLDSDGSFFLYSKLTVDKSRWQQGNVFSCSVMHEALHNHYTQKSLSLSPGK

SEQ ID NO: 1331 - protein, 216 aa, Artificial Sequence; identical to SEQ ID NO: 1051
  Description of Artificial Sequence: Synthetic polypeptide
  XENP37559 Chain 3 - 2G4[PD-L1]_L1

SEQ ID NO: 1332 - protein, 447 aa, Artificial Sequence; identical to SEQ ID NO: 1052
  Description of Artificial Sequence: Synthetic polypeptide
  XENP37560 Chain 1 - 2G4[PD-L1]_H1_IgG1_pI(-)_Isosteric_A_/PVA_/S 267K/L368D/K370S

SEQ ID NO: 1333 - protein, 479 aa, Artificial Sequence
  Description of Artificial Sequence: Synthetic polypeptide
  XENP37560 Chain 2 - 1A7[CD28]_H1.1_L1.71_scFv(GKPGS)4_Fc(216)_Ig G1_C220S/PVA_/S267K/S364K/E357Q
EVQLLESGGGLVQPGGSLRLSCAASGFTFSSYYMSWVRQAPGKGLEWVSTISGSGDSTYYADSVKGRFTISRDNSKNTLYLQMNSLRAEDTAVYYCAKSGPGLRQVGFDYWGQGTLVTVSSGKPGSGKPGSGKPGSGKPGSDIQMTQSPSSLSASVGDRVTITCRASQSISSYLNWYQQKPGKAPKLLIYAASSLQSGVPSRFSGSGSGTDFTLTISSLQPEDFATYYCQQVYSTPFTFGQGTKLEIKEPKSSDKTHTCPPCPAPPVAGPSVFLFPPKPKDTLMISRTPEVTCVVVDVKHEDPEVKFNWYVDGVEVHNAKTKPREEQYNSTYRVVSVLTVLHQDWLNGKEYKCKVSNKALPAPIEKTISKAKGQPREPQVYTLPPSREQMTKNQVKLTCLVKGFYPSDIAVEWESNGQPENNYKTTPPVLDSDGSFFLYSKLTVDKSRWQQGNVFSCSVMHEALHNHYTQKSLSLSPGK

SEQ ID NO: 1334 - protein, 216 aa, Artificial Sequence; identical to SEQ ID NO: 1051
  Description of Artificial Sequence: Synthetic polypeptide
  XENP37560 Chain 3 - 2G4[PD-L1]_L1

SEQ ID NO: 1335 - protein, 447 aa, Artificial Sequence; identical to SEQ ID NO: 1052
  Description of Artificial Sequence: Synthetic polypeptide
  XENP37561 Chain 1 - 2G4[PD-L1]_H1_IgG1_pI(-)_Isosteric_A_/PVA_/S 267K/L368D/K370S

SEQ ID NO: 1336 - protein, 479 aa, Artificial Sequence
  Description of Artificial Sequence: Synthetic polypeptide
  XENP37561 Chain 2 - 1A7[CD28]_L1.71_H1.14_scFv(GKPGS)4_Fc(216)_I gG1_C220S/PVA_/S267K/S364K/E357Q
DIQMTQSPSSLSASVGDRVTITCRASQSISSYLNWYQQKPGKAPKLLIYAASSLQSGVPSRFSGSGSGTDFTLTISSLQPEDFATYYCQQVYSTPFTFGQGTKLEIKGKPGSGKPGSGKPGSGKPGSEVQLLESGGGLVQPGGSLRLSCAASGFTFSSYYMSWVRQAPGKGLEWVSTISESGDSTYYADSVKGRFTISRDNSKNTLYLQMNSLRAEDTAVYYCAKSGPGLRQVGFDYWGQGTLVTVSSEPKSSDKTHTCPPCPAPPVAGPSVFLFPPKPKDTLMISRTPEVTCVVVDVKHEDPEVKFNWYVDGVEVHNAKTKPREEQYNSTYRVVSVLTVLHQDWLNGKEYKCKVSNKALPAPIEKTISKAKGQPREPQVYTLPPSREQMTKNQVKLTCLVKGFYPSDIAVEWESNGQPENNYKTTPPVLDSDGSFFLYSKLTVDKSRWQQGNVFSCSVMHEALHNHYTQKSLSLSPGK

SEQ ID NO: 1337 - protein, 216 aa, Artificial Sequence; identical to SEQ ID NO: 1051
  Description of Artificial Sequence: Synthetic polypeptide
  XENP37561 Chain 3 - 2G4[PD-L1]_L1

SEQ ID NO: 1338 - protein, 447 aa, Artificial Sequence
  Description of Artificial Sequence: Synthetic polypeptide
  XENP38482 Chain 1 - 2G4[PD-L1]_H1.1_IgG1_pI(-)_Isosteric_A_/PVA_ /S267K/L368D/K370S
EVQLLESGGGLVQPGGSLRLSCAASGFTFPSRDMSWVRQAPGKRLEWVSTISSGGSFTHYPDSVKGRFTISRDNSKNTLYLQMNSLRAEDTAVYYCVRRSGDWYFDVWGAGTTVTVSSASTKGPSVFPLAPSSKSTSGGTAALGCLVKDYFPEPVTVSWNSGALTSGVHTFPAVLQSSGLYSLSSVVTVPSSSLGTQTYICNVNHKPSDTKVDKKVEPKSCDKTHTCPPCPAPPVAGPSVFLFPPKPKDTLMISRTPEVTCVVVDVKHEDPEVKFNWYVDGVEVHNAKTKPREEEYNSTYRVVSVLTVLHQDWLNGKEYKCKVSNKALPAPIEKTISKAKGQPREPQVYTLPPSREEMTKNQVSLTCDVSGFYPSDIAVEWESDGQPENNYKTTPPVLDSDGSFFLYSKLTVDKSRWEQGDVFSCSVMHEALHNHYTQKSLSLSPGK

SEQ ID NO: 1339 - protein, 479 aa, Artificial Sequence; identical to SEQ ID NO: 1330
  Description of Artificial Sequence: Synthetic polypeptide
  XENP38482 Chain 2 - 1A7[CD28]_H1_L1.71_scFv(GKPGS)4_Fc(216)_IgG1 _C220S/PVA_/S267K/S364K/E357Q

SEQ ID NO: 1340 - protein, 216 aa, Artificial Sequence
  Description of Artificial Sequence: Synthetic polypeptide
  XENP38482 Chain 3 - 2G4[PD-L1]_L1.1 Light Chain
EIVLTQSPGTLSLSPGERATLSCRVSSSISSSNLHWYQQKPGQSPRPLIYGTSNLASGVPVRFSGSGSGTDYTLTISRLEPEDFAVYYCQQWWSYPLYTFGGGTKVEIKRTVAAPSVFIFPPSDEQLKSGTASVVCLLNNFYPREAKVQWKVDNALQSGNSQESVTEQDSKDSTYSLSSTLTLSKADYEKHKVYACEVTHQGLSSPVTKSFNRGEC

SEQ ID NO: 1341 - protein, 447 aa, Artificial Sequence
  Description of Artificial Sequence: Synthetic polypeptide
  XENP38490 Chain 1 - 2G4[PD-L1]_H1.9_IgG1_pI(-)_Isosteric_A_/PVA_ /S267K/L368D/K370S
EVQLLESGGGLVQPGGSLRLSCAASGFTFSFRDMSWVRQAPGKRLEWVSTISSGGSFTHYPDSVKGRFTISRDNSKNTLYLQMNSLRAEDTAVYYCVRRSGDWYFDVWGAGTTVTVSSASTKGPSVFPLAPSSKSTSGGTAALGCLVKDYFPEPVTVSWNSGALTSGVHTFPAVLQSSGLYSLSSVVTVPSSSLGTQTYICNVNHKPSDTKVDKKVEPKSCDKTHTCPPCPAPPVAGPSVFLFPPKPKDTLMISRTPEVTCVVVDVKHEDPEVKFNWYVDGVEVHNAKTKPREEEYNSTYRVVSVLTVLHQDWLNGKEYKCKVSNKALPAPIEKTISKAKGQPREPQVYTLPPSREEMTKNQVSLTCDVSGFYPSDIAVEWESDGQPENNYKTTPPVLDSDGSFFLYSKLTVDKSRWEQGDVFSCSVMHEALHNHYTQKSLSLSPGK

SEQ ID NO: 1342 - protein, 479 aa, Artificial Sequence; identical to SEQ ID NO: 1330
  Description of Artificial Sequence: Synthetic polypeptide
  XENP38490 Chain 2 - 1A7[CD28]_H1_L1.71_scFv(GKPGS)4_Fc(216)_IgG1 _C220S/PVA_/S267K/S364K/E357Q

SEQ ID NO: 1343 - protein, 216 aa, Artificial Sequence; identical to SEQ ID NO: 1051
  Description of Artificial Sequence: Synthetic polypeptide
  XENP38490 Chain 3 - 2G4[PD-L1]_L1

SEQ ID NO: 1344 - protein, 447 aa, Artificial Sequence
  Description of Artificial Sequence: Synthetic polypeptide
  XENP38494 Chain 1 - 2G4[PD-L1]_H1.10_IgG1_pI(-)_Isosteric_A_/PVA _/S267K/L368D/K370S
EVQLLESGGGLVQPGGSLRLSCAASGFTFSWYDMSWVRQAPGKRLEWVSTISSGGSFTHYPDSVKGRFTISRDNSKNTLYLQMNSLRAEDTAVYYCVRRSGDWYFDVWGAGTTVTVSSASTKGPSVFPLAPSSKSTSGGTAALGCLVKDYFPEPVTVSWNSGALTSGVHTFPAVLQSSGLYSLSSVVTVPSSSLGTQTYICNVNHKPSDTKVDKKVEPKSCDKTHTCPPCPAPPVAGPSVFLFPPKPKDTLMISRTPEVTCVVVDVKHEDPEVKFNWYVDGVEVHNAKTKPREEEYNSTYRVVSVLTVLHQDWLNGKEYKCKVSNKALPAPIEKTISKAKGQPREPQVYTLPPSREEMTKNQVSLTCDVSGFYPSDIAVEWESDGQPENNYKTTPPVLDSDGSFFLYSKLTVDKSRWEQGDVFSCSVMHEALHNHYTQKSLSLSPGK

SEQ ID NO: 1345 - protein, 479 aa, Artificial Sequence; identical to SEQ ID NO: 1330
  Description of Artificial Sequence: Synthetic polypeptide
  XENP38494 Chain 2 - 1A7[CD28]_H1_L1.71_scFv(GKPGS)4_Fc(216)_IgG1 _C220S/PVA_/S267K/S364K/E357Q

SEQ ID NO: 1346 - protein, 216 aa, Artificial Sequence
  Description of Artificial Sequence: Synthetic polypeptide
  XENP38494 Chain 3 - 2G4[PD-L1]_L1.23 Light Chain
EIVLTQSPGTLSLSPGERATLSCRVSLSIQSSNLHWYQQKPGQSPRPLIYGTNLLASGVPVRFSGSGSGTDYTLTISRLEPEDFAVYYCQQWSSYPLYTFGGGTKVEIKRTVAAPSVFIFPPSDEQLKSGTASVVCLLNNFYPREAKVQWKVDNALQSGNSQESVTEQDSKDSTYSLSSTLTLSKADYEKHKVYACEVTHQGLSSPVTKSFNRGEC

SEQ ID NO: 1347 - protein, 447 aa, Artificial Sequence; identical to SEQ ID NO: 1052
  Description of Artificial Sequence: Synthetic polypeptide
  XENP38502 Chain 1 - 2G4[PD-L1]_H1_IgG1_pI(-)_Isosteric_A_/PVA_/S 267K/L368D/K370S

SEQ ID NO: 1348 - protein, 479 aa, Artificial Sequence; identical to SEQ ID NO: 1330
  Description of Artificial Sequence: Synthetic polypeptide
  XENP38502 Chain 2 - 1A7[CD28]_H1_L1.71_scFv(GKPGS)4_Fc(216)_IgG1 _C220S/PVA_/S267K/S364K/E357Q

SEQ ID NO: 1349 - protein, 216 aa, Artificial Sequence
  Description of Artificial Sequence: Synthetic polypeptide
  XENP38502 Chain 3 - 2G4[PD-L1]_L1.25 Light Chain
EIVLTQSPGTLSLSPGERATLSCRVSSSIQPSNLHWYQQKPGQSPRPLIYGTSNLASGVPVRFSGSGSGTDYTLTISRLEPEDFAVYYCQQWSSYPLYTFGGGTKVEIKRTVAAPSVFIFPPSDEQLKSGTASVVCLLNNFYPREAKVQWKVDNALQSGNSQESVTEQDSKDSTYSLSSTLTLSKADYEKHKVYACEVTHQGLSSPVTKSFNRGEC

SEQ ID NO: 1350 - protein, 447 aa, Artificial Sequence
  Description of Artificial Sequence: Synthetic polypeptide
  XENP38506 Chain 1 - 2G4[PD-L1]_H1.8_IgG1_pI(-)_Isosteric_A_/PVA_ /S267K/L368D/K370S
EVQLLESGGGLVQPGGSLRLSCAASGFTFSSSDMSWVRQAPGKRLEWVSTISSGGSFTHYPDSVKGRFTISRDNSKNTLYLQMNSLRAEDTAVYYCVRRSGDWYFDVWGAGTTVTVSSASTKGPSVFPLAPSSKSTSGGTAALGCLVKDYFPEPVTVSWNSGALTSGVHTFPAVLQSSGLYSLSSVVTVPSSSLGTQTYICNVNHKPSDTKVDKKVEPKSCDKTHTCPPCPAPPVAGPSVFLFPPKPKDTLMISRTPEVTCVVVDVKHEDPEVKFNWYVDGVEVHNAKTKPREEEYNSTYRVVSVLTVLHQDWLNGKEYKCKVSNKALPAPIEKTISKAKGQPREPQVYTLPPSREEMTKNQVSLTCDVSGFYPSDIAVEWESDGQPENNYKTTPPVLDSDGSFFLYSKLTVDKSRWEQGDVFSCSVMHEALHNHYTQKSLSLSPGK

SEQ ID NO: 1351 - protein, 479 aa, Artificial Sequence; identical to SEQ ID NO: 1330
  Description of Artificial Sequence: Synthetic polypeptide
  XENP38506 Chain 2 - 1A7[CD28]_H1_L1.71_scFv(GKPGS)4_Fc(216)_IgG1 _C220S/PVA_/S267K/S364K/E357Q

SEQ ID NO: 1352 - protein, 216 aa, Artificial Sequence
  Description of Artificial Sequence: Synthetic polypeptide
  XENP38506 Chain 3 - 2G4[PD-L1]_L1.26 Light Chain
EIVLTQSPGTLSLSPGERATLSCRASSSIQDSNLHWYQQKPGQSPRLLIYGTSNLRSGVPVRFSGSGSGTDYTLTISRLEPEDFAVYYCQQWSSYPLYTFGGGTKVEIKRTVAAPSVFIFPPSDEQLKSGTASVVCLLNNFYPREAKVQWKVDNALQSGNSQESVTEQDSKDSTYSLSSTLTLSKADYEKHKVYACEVTHQGLSSPVTKSFNRGEC

SEQ ID NO: 1353 - protein, 447 aa, Artificial Sequence; identical to SEQ ID NO: 1052
  Description of Artificial Sequence: Synthetic polypeptide
  XENP38510 Chain 1 - 2G4[PD-L1]_H1_IgG1_pI(-)_Isosteric_A_/PVA_/S 267K/L368D/K370S

SEQ ID NO: 1354 - protein, 479 aa, Artificial Sequence; identical to SEQ ID NO: 1330
  Description of Artificial Sequence: Synthetic polypeptide
  XENP38510 Chain 2 - 1A7[CD28]_H1_L1.71_scFv(GKPGS)4_Fc(216)_IgG1 _C220S/PVA_/S267K/S364K/E357Q

SEQ ID NO: 1355 - protein, 216 aa, Artificial Sequence
  Description of Artificial Sequence: Synthetic polypeptide
  XENP38510 Chain 3 - 2G4[PD-L1]_L1.27 Light Chain
EIVLTQSPGTLSLSPGERATLSCRVSSSIQGSNLHWYQQKPGQSPRPLIYGTSNLASGVPVRFSGSGSGTDYTLTISRLEPEDFAVYYCQQWSSYPLYTFGGGTKVEIKRTVAAPSVFIFPPSDEQLKSGTASVVCLLNNFYPREAKVQWKVDNALQSGNSQESVTEQDSKDSTYSLSSTLTLSKADYEKHKVYACEVTHQGLSSPVTKSFNRGEC

SEQ ID NO: 1356 - protein, 447 aa, Artificial Sequence
  Description of Artificial Sequence: Synthetic polypeptide
  XENP38512 Chain 1 - 2G4[PD-L1]_H1.12_IgG1_pI(-)_Isosteric_A_/PVA _/S267K/L368D/K370S
EVQLLESGGGLVQPGGSLRLSCAASGFTFSVYDMSWVRQAPGKRLEWVSTISSGGSFTHYPDSVKGRFTISRDNSKNTLYLQMNSLRAEDTAVYYCVRRSLDWYFDVWGAGTTVTVSSASTKGPSVFPLAPSSKSTSGGTAALGCLVKDYFPEPVTVSWNSGALTSGVHTFPAVLQSSGLYSLSSVVTVPSSSLGTQTYICNVNHKPSDTKVDKKVEPKSCDKTHTCPPCPAPPVAGPSVFLFPPKPKDTLMISRTPEVTCVVVDVKHEDPEVKFNWYVDGVEVHNAKTKPREEEYNSTYRVVSVLTVLHQDWLNGKEYKCKVSNKALPAPIEKTISKAKGQPREPQVYTLPPSREEMTKNQVSLTCDVSGFYPSDIAVEWESDGQPENNYKTTPPVLDSDGSFFLYSKLTVDKSRWEQGDVFSCSVMHEALHNHYTQKSLSLSPGK

SEQ ID NO: 1357 - protein, 479 aa, Artificial Sequence; identical to SEQ ID NO: 1321
  Description of Artificial Sequence: Synthetic polypeptide
  XENP38512 Chain 2 - 1A7[CD28]_H1.14_L1.71_scFv(GKPGS)4_Fc(216)_I gG1_C220S/PVA_/S267K/S364K/E357Q

SEQ ID NO: 1358 - protein, 216 aa, Artificial Sequence
  Description of Artificial Sequence: Synthetic polypeptide
  XENP38512 Chain 3 - 2G4[PD-L1]_L1.24 Light Chain
EIVLTQSPGTLSLSPGERATLSCRVSSSIQSTNLHWYQQKPGQSPRPLIYGTSVLATGVPVRFSGSGSGTDYTLTISRLEPEDFAVYYCQQWSSYPLYTFGGGTKVEIKRTVAAPSVFIFPPSDEQLKSGTASVVCLLNNFYPREAKVQWKVDNALQSGNSQESVTEQDSKDSTYSLSSTLTLSKADYEKHKVYACEVTHQGLSSPVTKSFNRGEC

SEQ ID NO: 1359 - protein, 447 aa, Artificial Sequence; identical to SEQ ID NO: 1356
  Description of Artificial Sequence: Synthetic polypeptide
  XENP38514 Chain 1 - 2G4[PD-L1]_H1.12_IgG1_pI(-)_Isosteric_A_/PVA _/S267K/L368D/K370S

SEQ ID NO: 1360 - protein, 479 aa, Artificial Sequence; identical to SEQ ID NO: 1330
  Description of Artificial Sequence: Synthetic polypeptide
  XENP38514 Chain 2 - 1A7[CD28]_H1_L1.71_scFv(GKPGS)4_Fc(216)_IgG1 _C220S/PVA_/S267K/S364K/E357Q

SEQ ID NO: 1361 - protein, 216 aa, Artificial Sequence; identical to SEQ ID NO: 1358
  Description of Artificial Sequence: Synthetic polypeptide
  XENP38514 Chain 3 - 2G4[PD-L1]_L1.24

SEQ ID NO: 1362 - protein, 447 aa, Artificial Sequence
  Description of Artificial Sequence: Synthetic polypeptide
  XENP38518 Chain 1 - 2G4[PD-L1]_H1.14_IgG1_pI(-)_Isosteric_A_/PVA _/S267K/L368D/K370S
EVQLLESGGGLVQPGGSLRLSCAASGFTFSSSDMSWVRQAPGKRLEWVSTISSGGSFTHYPDSVKGRFTISRDNSKNTLYLQMNSLRAEDTAVYYCVRRSLDWYFDVWGAGTTVTVSSASTKGPSVFPLAPSSKSTSGGTAALGCLVKDYFPEPVTVSWNSGALTSGVHTFPAVLQSSGLYSLSSVVTVPSSSLGTQTYICNVNHKPSDTKVDKKVEPKSCDKTHTCPPCPAPPVAGPSVFLFPPKPKDTLMISRTPEVTCVVVDVKHEDPEVKFNWYVDGVEVHNAKTKPREEEYNSTYRVVSVLTVLHQDWLNGKEYKCKVSNKALPAPIEKTISKAKGQPREPQVYTLPPSREEMTKNQVSLTCDVSGFYPSDIAVEWESDGQPENNYKTTPPVLDSDGSFFLYSKLTVDKSRWEQGDVFSCSVMHEALHNHYTQKSLSLSPGK

SEQ ID NO: 1363 - protein, 479 aa, Artificial Sequence; identical to SEQ ID NO: 1330
  Description of Artificial Sequence: Synthetic polypeptide
  XENP38518 Chain 2 - 1A7[CD28]_H1_L1.71_scFv(GKPGS)4_Fc(216)_IgG1 _C220S/PVA_/S267K/S364K/E357Q

SEQ ID NO: 1364 - protein, 216 aa, Artificial Sequence; identical to SEQ ID NO: 1352
  Description of Artificial Sequence: Synthetic polypeptide
  XENP38518 Chain 3 - 2G4[PD-L1]_L1.26 Light Chain

SEQ ID NO: 1365 - protein, 447 aa, Artificial Sequence
  Description of Artificial Sequence: Synthetic polypeptide
  XENP38522 Chain 1 - 2G4[PD-L1]_H1.59_IgG1_pI(-)_Isosteric_A_/PVA _/S267K/L368D/K370S
EVQLLESGGGLVQPGGSLRLSCAASGFTFHSRDMSWVRQAPGKGLEWVSTISSGGRFTHYPDSVKGRFTISRDNSKNTLYLQMNSLRAEDTAVYYCARRSGDWYFDVWGAGTTVTVSSASTKGPSVFPLAPSSKSTSGGTAALGCLVKDYFPEPVTVSWNSGALTSGVHTFPAVLQSSGLYSLSSVVTVPSSSLGTQTYICNVNHKPSDTKVDKKVEPKSCDKTHTCPPCPAPPVAGPSVFLFPPKPKDTLMISRTPEVTCVVVDVKHEDPEVKFNWYVDGVEVHNAKTKPREEEYNSTYRVVSVLTVLHQDWLNGKEYKCKVSNKALPAPIEKTISKAKGQPREPQVYTLPPSREEMTKNQVSLTCDVSGFYPSDIAVEWESDGQPENNYKTTPPVLDSDGSFFLYSKLTVDKSRWEQGDVFSCSVMHEALHNHYTQKSLSLSPGK

SEQ ID NO: 1366 - protein, 479 aa, Artificial Sequence; identical to SEQ ID NO: 1330
  Description of Artificial Sequence: Synthetic polypeptide
  XENP38522 Chain 2 - 1A7[CD28]_H1_L1.71_scFv(GKPGS)4_Fc(216)_IgG1 _C220S/PVA_/S267K/S364K/E357Q

SEQ ID NO: 1367 - protein, 216 aa, Artificial Sequence
  Description of Artificial Sequence: Synthetic polypeptide
  XENP38522 Chain 3 - 2G4[PD-L1]_L1.60 Light Chain
EIVLTQSPGTLSLSPGERATLSCRASSSISSSNLHWYQQKPGQSPRLLIYGTSNLASGVPVRFSGSGSGTDYTLTISRLEPEDFAVYYCQQWSSYPLWTFGGGTKVEIKRTVAAPSVFIFPPSDEQLKSGTASVVCLLNNFYPREAKVQWKVDNALQSGNSQESVTEQDSKDSTYSLSSTLTLSKADYEKHKVYACEVTHQGLSSPVTKSFNRGEC

SEQ ID NO: 1368 - protein, 447 aa, Artificial Sequence
  Description of Artificial Sequence: Synthetic polypeptide
  XENP38526 Chain 1 - 2G4[PD-L1]_H1.60_IgG1_pI(-)_Isosteric_A_/PVA _/S267K/L368D/K370S
EVQLLESGGGLVQPGGSLRLSCAASGFTFSSSDMSWVRQAPGKGLEWVSTISSGGSFTHYPDSVKGRFTISRDNSKNTLYLQMNSLRAEDTAVYYCARRSLDWYFDVWGAGTTVTVSSASTKGPSVFPLAPSSKSTSGGTAALGCLVKDYFPEPVTVSWNSGALTSGVHTFPAVLQSSGLYSLSSVVTVPSSSLGTQTYICNVNHKPSDTKVDKKVEPKSCDKTHTCPPCPAPPVAGPSVFLFPPKPKDTLMISRTPEVTCVVVDVKHEDPEVKFNWYVDGVEVHNAKTKPREEEYNSTYRVVSVLTVLHQDWLNGKEYKCKVSNKALPAPIEKTISKAKGQPREPQVYTLPPSREEMTKNQVSLTCDVSGFYPSDIAVEWESDGQPENNYKTTPPVLDSDGSFFLYSKLTVDKSRWEQGDVFSCSVMHEALHNHYTQKSLSLSPGK

SEQ ID NO: 1369 - protein, 479 aa, Artificial Sequence; identical to SEQ ID NO: 1330
  Description of Artificial Sequence: Synthetic polypeptide
  XENP38526 Chain 2 - 1A7[CD28]_H1_L1.71_scFv(GKPGS)4_Fc(216)_IgG1 _C220S/PVA_/S267K/S364K/E357Q

SEQ ID NO: 1370 - protein, 216 aa, Artificial Sequence; identical to SEQ ID NO: 1367
  Description of Artificial Sequence: Synthetic polypeptide
  XENP38526 Chain 3 - 2G4[PD-L1]_L1.60 Light Chain

SEQ ID NO: 1371 - protein, 447 aa, Artificial Sequence; identical to SEQ ID NO: 1052
  Description of Artificial Sequence: Synthetic polypeptide
  XENP38580 Chain 1 - 2G4[PD-L1]_H1_IgG1_pI(-)_Isosteric_A_/PVA_/S 267K/L368D/K370S

SEQ ID NO: 1372 - protein, 479 aa, Artificial Sequence; identical to SEQ ID NO: 1330
  Description of Artificial Sequence: Synthetic polypeptide
  XENP38580 Chain 2 - 1A7[CD28]_H1_L1.71_scFv(GKPGS)4_Fc(216)_IgG1 _C220S/PVA_/S267K/S364K/E357Q

SEQ ID NO: 1373 - protein, 216 aa, Artificial Sequence
  Description of Artificial Sequence: Synthetic polypeptide
  XENP38580 Chain 3 - 2G4[PD-L1]_L1.29 Light Chain
EIVLTQSPGTLSLSPGERATLSCRVSSRIVLSNLHWYQQKPGQSPRPLIYGTSVLATGVPVRFSGSGSGTDYTLTISRLEPEDFAVYYCQQWSSYPLWTFGGGTKVEIKRTVAAPSVFIFPPSDEQLKSGTASVVCLLNNFYPREAKVQWKVDNALQSGNSQESVTEQDSKDSTYSLSSTLTLSKADYEKHKVYACEVTHQGLSSPVTKSFNRGEC

SEQ ID NO: 1374 - protein, 447 aa, Artificial Sequence
  Description of Artificial Sequence: Synthetic polypeptide
  XENP38584 Chain 1 - 2G4[PD-L1]_H1.4_IgG1_pI(-)_Isosteric_A_/PVA_ /S267K/L368D/K370S
EVQLLESGGGLVQPGGSLRLSCAASGFTFSSYDMSWVRQAPGKRLEWVSTISSGGSFTHYPDSVKGRFTISRDNSKNTLYLQMNSLRAEDTAVYYCARRSLDWYFDVWGAGTTVTVSSASTKGPSVFPLAPSSKSTSGGTAALGCLVKDYFPEPVTVSWNSGALTSGVHTFPAVLQSSGLYSLSSVVTVPSSSLGTQTYICNVNHKPSDTKVDKKVEPKSCDKTHTCPPCPAPPVAGPSVFLFPPKPKDTLMISRTPEVTCVVVDVKHEDPEVKFNWYVDGVEVHNAKTKPREEEYNSTYRVVSVLTVLHQDWLNGKEYKCKVSNKALPAPIEKTISKAKGQPREPQVYTLPPSREEMTKNQVSLTCDVSGFYPSDIAVEWESDGQPENNYKTTPPVLDSDGSFFLYSKLTVDKSRWEQGDVFSCSVMHEALHNHYTQKSLSLSPGK

SEQ ID NO: 1375 - protein, 479 aa, Artificial Sequence; identical to SEQ ID NO: 1330
  Description of Artificial Sequence: Synthetic polypeptide
  XENP38584 Chain 2 - 1A7[CD28]_H1_L1.71_scFv(GKPGS)4_Fc(216)_IgG1 _C220S/PVA_/S267K/S364K/E357Q

SEQ ID NO: 1376 - protein, 216 aa, Artificial Sequence; identical to SEQ ID NO: 1346
  Description of Artificial Sequence: Synthetic polypeptide
  XENP38584 Chain 3 - 2G4[PD-L1]_L1.23

SEQ ID NO: 1377 - protein, 447 aa, Artificial Sequence; identical to SEQ ID NO: 1374
  Description of Artificial Sequence: Synthetic polypeptide
  XENP38585 Chain 1 - 2G4[PD-L1]_H1.4_IgG1_pI(-)_Isosteric_A_/PVA_ /S267K/L368D/K370S

SEQ ID NO: 1378 - protein, 479 aa, Artificial Sequence; identical to SEQ ID NO: 1330
  Description of Artificial Sequence: Synthetic polypeptide
  XENP38585 Chain 2 - 1A7[CD28]_H1_L1.71_scFv(GKPGS)4_Fc(216)_IgG1 _C220S/PVA_/S267K/S364K/E357Q

SEQ ID NO: 1379 - protein, 216 aa, Artificial Sequence; identical to SEQ ID NO: 1358
  Description of Artificial Sequence: Synthetic polypeptide
  XENP38585 Chain 3 - 2G4[PD-L1]_L1.24

SEQ ID NO: 1380 - protein, 447 aa, Artificial Sequence
  Description of Artificial Sequence: Synthetic polypeptide
  XENP38586 Chain 1 - 2G4[PD-L1]_H1.61_IgG1_pI(-)_Isosteric_A_/PVA _/S267K/L368D/K370S
EVQLLESGGGLVQPGGSLRLSCAASGFTFSSYDMSWVRQAPGKGLEWVSTISSGGSFTHYPDSVKGRFTISRDNSKNTLYLQMNSLRAEDTAVYYCARRSLDWYFDVWGAGTTVTVSSASTKGPSVFPLAPSSKSTSGGTAALGCLVKDYFPEPVTVSWNSGALTSGVHTFPAVLQSSGLYSLSSVVTVPSSSLGTQTYICNVNHKPSDTKVDKKVEPKSCDKTHTCPPCPAPPVAGPSVFLFPPKPKDTLMISRTPEVTCVVVDVKHEDPEVKFNWYVDGVEVHNAKTKPREEEYNSTYRVVSVLTVLHQDWLNGKEYKCKVSNKALPAPIEKTISKAKGQPREPQVYTLPPSREEMTKNQVSLTCDVSGFYPSDIAVEWESDGQPENNYKTTPPVLDSDGSFFLYSKLTVDKSRWEQGDVFSCSVMHEALHNHYTQKSLSLSPGK

SEQ ID NO: 1381 - protein, 479 aa, Artificial Sequence; identical to SEQ ID NO: 1330
  Description of Artificial Sequence: Synthetic polypeptide
  XENP38586 Chain 2 - 1A7[CD28]_H1_L1.71_scFv(GKPGS)4_Fc(216)_IgG1 _C220S/PVA_/S267K/S364K/E357Q

SEQ ID NO: 1382 - protein, 216 aa, Artificial Sequence
  Description of Artificial Sequence: Synthetic polypeptide
  XENP38586 Chain 3 - 2G4[PD-L1]_L1.61 Light Chain
EIVLTQSPGTLSLSPGERATLSCRASLSIQSSNLHWYQQKPGQSPRLLIYGTNLLASGVPVRFSGSGSGTDYTLTISRLEPEDFAVYYCQQWSSYPLYTFGGGTKVEIKRTVAAPSVFIFPPSDEQLKSGTASVVCLLNNFYPREAKVQWKVDNALQSGNSQESVTEQDSKDSTYSLSSTLTLSKADYEKHKVYACEVTHQGLSSPVTKSFNRGEC

SEQ ID NO: 1383 - protein, 447 aa, Artificial Sequence; identical to SEQ ID NO: 1380
  Description of Artificial Sequence: Synthetic polypeptide
  XENP38587 Chain 1 - 2G4[PD-L1]_H1.61_IgG1_pI(-)_Isosteric_A_/PVA _/S267K/L368D/K370S

SEQ ID NO: 1384 - protein, 479 aa, Artificial Sequence; identical to SEQ ID NO: 1330
  Description of Artificial Sequence: Synthetic polypeptide
  XENP38587 Chain 2 - 1A7[CD28]_H1_L1.71_scFv(GKPGS)4_Fc(216)_IgG1 _C220S/PVA_/S267K/S364K/E357Q

SEQ ID NO: 1385 - protein, 216 aa, Artificial Sequence
  Description of Artificial Sequence: Synthetic polypeptide
  XENP38587 Chain 3 - 2G4[PD-L1]_L1.62 Light Chain
EIVLTQSPGTLSLSPGERATLSCRASSSIQSTNLHWYQQKPGQSPRLLIYGTSVLATGVPVRFSGSGSGTDYTLTISRLEPEDFAVYYCQQWSSYPLYTFGGGTKVEIKRTVAAPSVFIFPPSDEQLKSGTASVVCLLNNFYPREAKVQWKVDNALQSGNSQESVTEQDSKDSTYSLSSTLTLSKADYEKHKVYACEVTHQGLSSPVTKSFNRGEC

SEQ ID NO: 1386 - protein, 447 aa, Artificial Sequence
  Description of Artificial Sequence: Synthetic polypeptide
  XENP39153 Chain 1 - 2G4[PD-L1]_H1.62_IgG1_pI(-)_Isosteric_A_/PVA _/S267K/L368D/K370S
EVQLLESGGGLVQPGGSLRLSCAASGFTFSSYDMSWVRQAPGKGLEWVSTISSGGSFTHYPDSVKGRFTISRDNSKNTLYLQMNSLRAEDTAVYYCARRSGDWYFDVWGAGTTVTVSSASTKGPSVFPLAPSSKSTSGGTAALGCLVKDYFPEPVTVSWNSGALTSGVHTFPAVLQSSGLYSLSSVVTVPSSSLGTQTYICNVNHKPSDTKVDKKVEPKSCDKTHTCPPCPAPPVAGPSVFLFPPKPKDTLMISRTPEVTCVVVDVKHEDPEVKFNWYVDGVEVHNAKTKPREEEYNSTYRVVSVLTVLHQDWLNGKEYKCKVSNKALPAPIEKTISKAKGQPREPQVYTLPPSREEMTKNQVSLTCDVSGFYPSDIAVEWESDGQPENNYKTTPPVLDSDGSFFLYSKLTVDKSRWEQGDVFSCSVMHEALHNHYTQKSLSLSPGK

SEQ ID NO: 1387 - protein, 479 aa, Artificial Sequence; identical to SEQ ID NO: 1330
  Description of Artificial Sequence: Synthetic polypeptide
  XENP39153 Chain 2 - 1A7[CD28]_H1_L1.71_scFv(GKPGS)4_Fc(216)_IgG1 _C220S/PVA_/S267K/S364K/E357Q

SEQ ID NO: 1388 - protein, 216 aa, Artificial Sequence
  Description of Artificial Sequence: Synthetic polypeptide
  XENP39153 Chain 3 - 2G4[PD-L1]_L1.63 Light Chain
EIVLTQSPGTLSLSPGERATLSCRASSSISSSNLHWYQQKPGQSPRLLIYGTSNLASGVPVRFSGSGSGTDYTLTISRLEPEDFAVYYCQQWSSYPLYTFGGGTKVEIKRTVAAPSVFIFPPSDEQLKSGTASVVCLLNNFYPREAKVQWKVDNALQSGNSQESVTEQDSKDSTYSLSSTLTLSKADYEKHKVYACEVTHQGLSSPVTKSFNRGEC

SEQ ID NO: 1389 - protein, 447 aa, Artificial Sequence; identical to SEQ ID NO: 1374
  Description of Artificial Sequence: Synthetic polypeptide
  XENP39363 Chain 1 - 2G4[PD-L1]_H1.4_IgG1_pI(-)_Isosteric_A_/PVA_ /S267K/L368D/K370S

SEQ ID NO: 1390 - protein, 479 aa, Artificial Sequence; identical to SEQ ID NO: 1321
  Description of Artificial Sequence: Synthetic polypeptide
  XENP39363 Chain 2 - 1A7[CD28]_H1.14_L1.71_scFv(GKPGS)4_Fc(216)_I gG1_C220S/PVA_/S267K/S364K/E357Q

SEQ ID NO: 1391 - protein, 216 aa, Artificial Sequence; identical to SEQ ID NO: 1346
  Description of Artificial Sequence: Synthetic polypeptide
  XENP39363 Chain 3 - 2G4[PD-L1]_L1.23

SEQ ID NO: 1392 - protein, 447 aa, Artificial Sequence; identical to SEQ ID NO: 1374
  Description of Artificial Sequence: Synthetic polypeptide
  XENP39364 Chain 1 - 2G4[PD-L1]_H1.4_IgG1_pI(-)_Isosteric_A_/PVA_ /S267K/L368D/K370S

SEQ ID NO: 1393 - protein, 479 aa, Artificial Sequence; identical to SEQ ID NO: 1333
  Description of Artificial Sequence: Synthetic polypeptide
  XENP39364 Chain 2 - 1A7[CD28]_H1.1_L1.71_scFv(GKPGS)4_Fc(216)_Ig G1_C220S/PVA_/S267K/S364K/E357Q

SEQ ID NO: 1394 - protein, 216 aa, Artificial Sequence; identical to SEQ ID NO: 1346
  Description of Artificial Sequence: Synthetic polypeptide
  XENP39364 Chain 3 - 2G4[PD-L1]_L1.23

SEQ ID NO: 1395 - protein, 447 aa, Artificial Sequence; identical to SEQ ID NO: 1374
  Description of Artificial Sequence: Synthetic polypeptide
  XENP39365 Chain 1 - 2G4[PD-L1]_H1.4_IgG1_pI(-)_Isosteric_A_/PVA_ /S267K/L368D/K370S

SEQ ID NO: 1396 - protein, 479 aa, Artificial Sequence; identical to SEQ ID NO: 1312
  Description of Artificial Sequence: Synthetic polypeptide
  XENP39365 Chain 2 - 1A7[CD28]_H1.14_L1_scFv(GKPGS)4_Fc(216)_IgG1 _C220S/PVA_/S267K/S364K/E357Q

SEQ ID NO: 1397 - protein, 216 aa, Artificial Sequence; identical to SEQ ID NO: 1346
  Description of Artificial Sequence: Synthetic polypeptide
  XENP39365 Chain 3 - 2G4[PD-L1]_L1.23

SEQ ID NO: 1398 - protein, 447 aa, Artificial Sequence; identical to SEQ ID NO: 1374
  Description of Artificial Sequence: Synthetic polypeptide
  XENP39366 Chain 1 - 2G4[PD-L1]_H1.4_IgG1_pI(-)_Isosteric_A_/PVA_ /S267K/L368D/K370S

SEQ ID NO: 1399 - protein, 479 aa, Artificial Sequence; identical to SEQ ID NO: 1321
  Description of Artificial Sequence: Synthetic polypeptide
  XENP39366 Chain 2 - 1A7[CD28]_H1.14_L1.71_scFv(GKPGS)4_Fc(216)_I gG1_C220S/PVA_/S267K/S364K/E357Q

SEQ ID NO: 1400 - protein, 216 aa, Artificial Sequence; identical to SEQ ID NO: 1358
  Description of Artificial Sequence: Synthetic polypeptide
  XENP39366 Chain 3 - 2G4[PD-L1]_L1.24

SEQ ID NO: 1401 - protein, 447 aa, Artificial Sequence; identical to SEQ ID NO: 1374
  Description of Artificial Sequence: Synthetic polypeptide
  XENP39367 Chain 1 - 2G4[PD-L1]_H1.4_IgG1_pI(-)_Isosteric_A_/PVA_ /S267K/L368D/K370S

SEQ ID NO: 1402 - protein, 479 aa, Artificial Sequence; identical to SEQ ID NO: 1333
  Description of Artificial Sequence: Synthetic polypeptide
  XENP39367 Chain 2 - 1A7[CD28]_H1.1_L1.71_scFv(GKPGS)4_Fc(216)_Ig G1_C220S/PVA_/S267K/S364K/E357Q

SEQ ID NO: 1403 - protein, 216 aa, Artificial Sequence; identical to SEQ ID NO: 1358
  Description of Artificial Sequence: Synthetic polypeptide
  XENP39367 Chain 3 - 2G4[PD-L1]_L1.24

SEQ ID NO: 1404 - protein, 447 aa, Artificial Sequence; identical to SEQ ID NO: 1374
  Description of Artificial Sequence: Synthetic polypeptide
  XENP39368 Chain 1 - 2G4[PD-L1]_H1.4_IgG1_pI(-)_Isosteric_A_/PVA_ /S267K/L368D/K370S

SEQ ID NO: 1405 - protein, 479 aa, Artificial Sequence; identical to SEQ ID NO: 1312
  Description of Artificial Sequence: Synthetic polypeptide
  XENP39368 Chain 2 - 1A7[CD28]_H1.14_L1_scFv(GKPGS)4_Fc(216)_IgG1 _C220S/PVA_/S267K/S364K/E357Q

SEQ ID NO: 1406 - protein, 216 aa, Artificial Sequence; identical to SEQ ID NO: 1358
  Description of Artificial Sequence: Synthetic polypeptide
  XENP39368 Chain 3 - 2G4[PD-L1]_L1.24

SEQ ID NO: 1407 - protein, 447 aa, Artificial Sequence
  Description of Artificial Sequence: Synthetic polypeptide
  XENP39733 Chain 1 - 2G4[PD-L1]_H1.12_IgG1_pI(-)_Isosteric_A_/PVA _/S267K/L368D/K370S/M428L/N434S
EVQLLESGGGLVQPGGSLRLSCAASGFTFSVYDMSWVRQAPGKRLEWVSTISSGGSFTHYPDSVKGRFTISRDNSKNTLYLQMNSLRAEDTAVYYCVRRSLDWYFDVWGAGTTVTVSSASTKGPSVFPLAPSSKSTSGGTAALGCLVKDYFPEPVTVSWNSGALTSGVHTFPAVLQSSGLYSLSSVVTVPSSSLGTQTYICNVNHKPSDTKVDKKVEPKSCDKTHTCPPCPAPPVAGPSVFLFPPKPKDTLMISRTPEVTCVVVDVKHEDPEVKFNWYVDGVEVHNAKTKPREEEYNSTYRVVSVLTVLHQDWLNGKEYKCKVSNKALPAPIEKTISKAKGQPREPQVYTLPPSREEMTKNQVSLTCDVSGFYPSDIAVEWESDGQPENNYKTTPPVLDSDGSFFLYSKLTVDKSRWEQGDVFSCSVLHEALHSHYTQKSLSLSPGK

SEQ ID NO: 1408 - protein, 479 aa, Artificial Sequence; identical to SEQ ID NO: 1324
  Description of Artificial Sequence: Synthetic polypeptide
  XENP39733 Chain 2 - 1A7[CD28]_H1.14_L1.71_scFv(GKPGS)4_Fc(216)_I gG1_C220S/PVA_/S267K/S364K/E357Q/M428L/N434S

SEQ ID NO: 1409 - protein, 216 aa, Artificial Sequence; identical to SEQ ID NO: 1358
  Description of Artificial Sequence: Synthetic polypeptide
  XENP39733 Chain 3 - 2G4[PD-L1]_L1.24 Light Chain

SEQ ID NO: 1410 - protein, 447 aa, Artificial Sequence; identical to SEQ ID NO: 1356
  Description of Artificial Sequence: Synthetic polypeptide
  XENP40036 Chain 1 - 2G4[PD-L1]_H1.12_IgG1_pI(-)_Isosteric_A_/PVA _/S267K/L368D/K370S

SEQ ID NO: 1411 - protein, 479 aa, Artificial Sequence; identical to SEQ ID NO: 1321
  Description of Artificial Sequence: Synthetic polypeptide
  XENP40036 Chain 2 - 1A7[CD28]_H1.14_L1.71_scFv(GKPGS)4_Fc(216)_I gG1_C220S/PVA_/S267K/S364K/E357Q

SEQ ID NO: 1412 - protein, 216 aa, Artificial Sequence; identical to SEQ ID NO: 1358
  Description of Artificial Sequence: Synthetic polypeptide
  XENP40036 Chain 3 - 2G4[PD-L1]_L1.24 Light Chain

SEQ ID NO: 1413 - protein, 447 aa, Artificial Sequence; identical to SEQ ID NO: 1356
  Description of Artificial Sequence: Synthetic polypeptide
  XENP40403 Chain 1 - 2G4[PD-L1]_H1.12_IgG1_pI(-)_Isosteric_A_/PVA _/S267K/L368D/K370S

SEQ ID NO: 1414 - protein, 479 aa, Artificial Sequence; identical to SEQ ID NO: 1321
  Description of Artificial Sequence: Synthetic polypeptide
  XENP40403 Chain 2 - 1A7[CD28]_H1.14_L1.71_scFv(GKPGS)4_Fc(216)_I gG1_C220S/PVA_/S267K/S364K/E357Q

SEQ ID NO: 1415 - protein, 216 aa, Artificial Sequence
  Description of Artificial Sequence: Synthetic polypeptide
  XENP40403 Chain 3 - 2G4[PD-L1]_L1.66 Light Chain
EIVLTQSPGTLSLSPGERATLSCRVSSSIQSTNLHWYQQKPGQSPRPLIYGTSNLATGVPVRFSGSGSGTDYTLTISRLEPEDFAVYYCQQWSSYPLYTFGGGTKVEIKRTVAAPSVFIFPPSDEQLKSGTASVVCLLNNFYPREAKVQWKVDNALQSGNSQESVTEQDSKDSTYSLSSTLTLSKADYEKHKVYACEVTHQGLSSPVTKSFNRGEC

SEQ ID NO: 1416 - protein, 447 aa, Artificial Sequence; identical to SEQ ID NO: 1356
  Description of Artificial Sequence: Synthetic polypeptide
  XENP40405 Chain 1 - 2G4[PD-L1]_H1.12_IgG1_pI(-)_Isosteric_A_/PVA _/S267K/L368D/K370S

SEQ ID NO: 1417 - protein, 479 aa, Artificial Sequence; identical to SEQ ID NO: 1321
  Description of Artificial Sequence: Synthetic polypeptide
  XENP40405 Chain 2 - 1A7[CD28]_H1.14_L1.71_scFv(GKPGS)4_Fc(216)_I gG1_C220S/PVA_/S267K/S364K/E357Q

SEQ ID NO: 1418 - protein, 216 aa, Artificial Sequence
  Description of Artificial Sequence: Synthetic polypeptide
  XENP40405 Chain 3 - 2G4[PD-L1]_L1.68 Light Chain
EIVLTQSPGTLSLSPGERATLSCRVSSSIQSTNLHWYQQKPGQSPRPLIYGTSNLASGVPVRFSGSGSGTDYTLTISRLEPEDFAVYYCQQWSSYPLYTFGGGTKVEIKRTVAAPSVFIFPPSDEQLKSGTASVVCLLNNFYPREAKVQWKVDNALQSGNSQESVTEQDSKDSTYSLSSTLTLSKADYEKHKVYACEVTHQGLSSPVTKSFNRGEC

SEQ ID NO: 1419 - protein, 447 aa, Artificial Sequence; identical to SEQ ID NO: 1356
  Description of Artificial Sequence: Synthetic polypeptide
  XENP40409 Chain 1 - 2G4[PD-L1]_H1.12_IgG1_pI(-)_Isosteric_A_/PVA _/S267K/L368D/K370S

SEQ ID NO: 1420 - protein, 479 aa, Artificial Sequence; identical to SEQ ID NO: 1321
  Description of Artificial Sequence: Synthetic polypeptide
  XENP40409 Chain 2 - 1A7[CD28]_H1.14_L1.71_scFv(GKPGS)4_Fc(216)_I gG1_C220S/PVA_/S267K/S364K/E357Q

SEQ ID NO: 1421 - protein, 216 aa, Artificial Sequence
  Description of Artificial Sequence: Synthetic polypeptide
  XENP40409 Chain 3 - 2G4[PD-L1]_L1.14 Light Chain
EIVLTQSPGTLSLSPGERATLSCRVSSSIQSSNLHWYQQKPGQSPRPLIYGTSNLASGVPVRFSGSGSGTDYTLTISRLEPEDFAVYYCQQWSSYPLYTFGGGTKVEIKRTVAAPSVFIFPPSDEQLKSGTASVVCLLNNFYPREAKVQWKVDNALQSGNSQESVTEQDSKDSTYSLSSTLTLSKADYEKHKVYACEVTHQGLSSPVTKSFNRGEC

SEQ ID NO: 1422 - protein, 447 aa, Artificial Sequence; identical to SEQ ID NO: 1407
  Description of Artificial Sequence: Synthetic polypeptide
  XENP40706 Chain 1 - 2G4[PD-L1]_H1.12_IgG1_pI(-)_Isosteric_A_/PVA _/S267K/L368D/K370S/M428L/N434S

SEQ ID NO: 1423 - protein, 479 aa, Artificial Sequence; identical to SEQ ID NO: 1324
  Description of Artificial Sequence: Synthetic polypeptide
  XENP40706 Chain 2 - 1A7[CD28]_H1.14_L1.71_scFv(GKPGS)4_Fc(216)_I gG1_C220S/PVA_/S267K/S364K/E357Q/M428L/N434S

SEQ ID NO: 1424 - protein, 216 aa, Artificial Sequence; identical to SEQ ID NO: 1421
  Description of Artificial Sequence: Synthetic polypeptide
  XENP40706 Chain 3 - 2G4[PD-L1]_L1.14 Light Chain

SEQ ID NO: 1425 - protein, 449 aa, Artificial Sequence; identical to SEQ ID NO: 1311
  Description of Artificial Sequence: Synthetic polypeptide
  XENP34961 Chain 1 - avelumab[PD-L1]_H1_IgG1_pI(-)_Isosteric_A_/P VA_/S267K/L368D/K370S-Fc(222)_IgG1_PVA_/S267K/S364K/E357Q

SEQ ID NO: 1426 - protein, 716 aa, Artificial Sequence
  Description of Artificial Sequence: Synthetic polypeptide
  XENP34961 Chain 2 - avelumab[PD-L1]_H1_(G4S)2_1A7[CD28]_H1.14_L1 _scFv(GKPGS)4_(G4S)2_Fc(222)_IgG1_PVA_/S267K/S364K/E357Q
EVQLLESGGGLVQPGGSLRLSCAASGFTFSSYIMMWVRQAPGKGLEWVSSIYPSGGITFYADTVKGRFTISRDNSKNTLYLQMNSLRAEDTAVYYCARIKLGTVTTVDYWGQGTLVTVSSASTKGPSVFPLAPSSKSTSGGTAALGCLVKDYFPEPVTVSWNSGALTSGVHTFPAVLQSSGLYSLSSVVTVPSSSLGTQTYICNVNHKPSNTKVDKKVEPKSCGGGGSGGGGSEVQLLESGGGLVQPGGSLRLSCAASGFTFSSYYMSWVRQAPGKGLEWVSTISESGDSTYYADSVKGRFTISRDNSKNTLYLQMNSLRAEDTAVYYCAKSGPGLRQVGFDYWGQGTLVTVSSGKPGSGKPGSGKPGSGKPGSDIQMTQSPSSLSASVGDRVTITCRASQSISSYLNWYQQKPGKAPKLLIYAASSLQSGVPSRFSGSGSGTDFTLTISSLQPEDFATYYCQQSYSTPFTFGQGTKLEIKGGGGSGGGGSKTHTCPPCPAPPVAGPSVFLFPPKPKDTLMISRTPEVTCVVVDVKHEDPEVKFNWYVDGVEVHNAKTKPREEQYNSTYRVVSVLTVLHQDWLNGKEYKCKVSNKALPAPIEKTISKAKGQPREPQVYTLPPSREQMTKNQVKLTCLVKGFYPSDIAVEWESNGQPENNYKTTPPVLDSDGSFFLYSKLTVDKSRWQQGNVFSCSVMHEALHNHYTQKSLSLSPGK

SEQ ID NO: 1427 - protein, 216 aa, Artificial Sequence; identical to SEQ ID NO: 1313
  Description of Artificial Sequence: Synthetic polypeptide
  XENP34961 Chain 3 - avelumab[PD-L1]_L1 Light Chain

SEQ ID NO: 1428 - protein, 447 aa, Artificial Sequence; identical to SEQ ID NO: 1052
  Description of Artificial Sequence: Synthetic polypeptide
  XENP36154 Chain 1 - 2G4[PD-L1]_H1_IgG1_pI(-)_Isosteric_A_/PVA_/S 267K/L368D/K370S

SEQ ID NO: 1429 - protein, 714 aa, Artificial Sequence
  Description of Artificial Sequence: Synthetic polypeptide
  XENP36154 Chain 2 - 2G4[PD-L1]_H1_(G4S)2_1A7[CD28]_H1.14_L1_scFv (GKPGS)4_(G4S)2_Fc(222)_IgG1_PVA_/S267K/S364K/E357Q
EVQLLESGGGLVQPGGSLRLSCAASGFTFSSYDMSWVRQAPGKRLEWVSTISSGGSFTHYPDSVKGRFTISRDNSKNTLYLQMNSLRAEDTAVYYCVRRSGDWYFDVWGAGTTVTVSSASTKGPSVFPLAPSSKSTSGGTAALGCLVKDYFPEPVTVSWNSGALTSGVHTFPAVLQSSGLYSLSSVVTVPSSSLGTQTYICNVNHKPSNTKVDKKVEPKSCGGGGSGGGGSEVQLLESGGGLVQPGGSLRLSCAASGFTFSSYYMSWVRQAPGKGLEWVSTISESGDSTYYADSVKGRFTISRDNSKNTLYLQMNSLRAEDTAVYYCAKSGPGLRQVGFDYWGQGTLVTVSSGKPGSGKPGSGKPGSGKPGSDIQMTQSPSSLSASVGDRVTITCRASQSISSYLNWYQQKPGKAPKLLIYAASSLQSGVPSRFSGSGSGTDFTLTISSLQPEDFATYYCQQSYSTPFTFGQGTKLEIKGGGGSGGGGSKTHTCPPCPAPPVAGPSVFLFPPKPKDTLMISRTPEVTCVVVDVKHEDPEVKFNWYVDGVEVHNAKTKPREEQYNSTYRVVSVLTVLHQDWLNGKEYKCKVSNKALPAPIEKTISKAKGQPREPQVYTLPPSREQMTKNQVKLTCLVKGFYPSDIAVEWESNGQPENNYKTTPPVLDSDGSFFLYSKLTVDKSRWQQGNVFSCSVMHEALHNHYTQKSLSLSPGK

SEQ ID NO: 1430 - protein, 216 aa, Artificial Sequence; identical to SEQ ID NO: 1051
  Description of Artificial Sequence: Synthetic polypeptide
  XENP36154 Chain 3 - 2G4[PD-L1]_L1 Light Chain

SEQ ID NO: 1431 - protein, 447 aa, Artificial Sequence; identical to SEQ ID NO: 1317
  Description of Artificial Sequence: Synthetic polypeptide
  XENP36803 Chain 1 - 2G4[PD-L1]_H1_IgG1_pI(-)_Isosteric_A_/PVA_/S 267K/L368D/K370S/M428L/N434S

SEQ ID NO: 1432 - protein, 709 aa, Artificial Sequence
  Description of Artificial Sequence: Synthetic polypeptide
  XENP36803 Chain 2 - 2G4[PD-L1]_H1_IgG1_PVA_/S267K/S364K/E357Q/M4 28L/N434S/K447del_(G4S)3_1A7[CD28]_H1.14_L1_scFv(GKPGS)4
EVQLLESGGGLVQPGGSLRLSCAASGFTFSSYDMSWVRQAPGKRLEWVSTISSGGSFTHYPDSVKGRFTISRDNSKNTLYLQMNSLRAEDTAVYYCVRRSGDWYFDVWGAGTTVTVSSASTKGPSVFPLAPSSKSTSGGTAALGCLVKDYFPEPVTVSWNSGALTSGVHTFPAVLQSSGLYSLSSVVTVPSSSLGTQTYICNVNHKPSNTKVDKKVEPKSCDKTHTCPPCPAPPVAGPSVFLFPPKPKDTLMISRTPEVTCVVVDVKHEDPEVKFNWYVDGVEVHNAKTKPREEQYNSTYRVVSVLTVLHQDWLNGKEYKCKVSNKALPAPIEKTISKAKGQPREPQVYTLPPSREQMTKNQVKLTCLVKGFYPSDIAVEWESNGQPENNYKTTPPVLDSDGSFFLYSKLTVDKSRWQQGNVFSCSVLHEALHSHYTQKSLSLSPGGGGGSGGGGSGGGGSEVQLLESGGGLVQPGGSLRLSCAASGFTFSSYYMSWVRQAPGKGLEWVSTISESGDSTYYADSVKGRFTISRDNSKNTLYLQMNSLRAEDTAVYYCAKSGPGLRQVGFDYWGQGTLVTVSSGKPGSGKPGSGKPGSGKPGSDIQMTQSPSSLSASVGDRVTITCRASQSISSYLNWYQQKPGKAPKLLIYAASSLQSGVPSRFSGSGSGTDFTLTISSLQPEDFATYYCQQSYSTPFTFGQGTKLEIK

SEQ ID NO: 1433 - protein, 216 aa, Artificial Sequence; identical to SEQ ID NO: 1051
  Description of Artificial Sequence: Synthetic polypeptide
  XENP36803 Chain 3 - 2G4[PD-L1]_L1 Light Chain

SEQ ID NO: 1434 - protein, 449 aa, Artificial Sequence
  Description of Artificial Sequence: Synthetic polypeptide
  XENP24118 Heavy Chain -  avelumab[PD-L1]_H1
EVQLLESGGGLVQPGGSLRLSCAASGFTFSSYIMMWVRQAPGKGLEWVSSIYPSGGITFYADTVKGRFTISRDNSKNTLYLQMNSLRAEDTAVYYCARIKLGTVTTVDYWGQGTLVTVSSASTKGPSVFPLAPSSKSTSGGTAALGCLVKDYFPEPVTVSWNSGALTSGVHTFPAVLQSSGLYSLSSVVTVPSSSLGTQTYICNVNHKPSNTKVDKKVEPKSCDKTHTCPPCPAPPVAGPSVFLFPPKPKDTLMISRTPEVTCVVVDVKHEDPEVKFNWYVDGVEVHNAKTKPREEQYNSTYRVVSVLTVLHQDWLNGKEYKCKVSNKALPAPIEKTISKAKGQPREPQVYTLPPSREEMTKNQVSLTCLVKGFYPSDIAVEWESNGQPENNYKTTPPVLDSDGSFFLYSKLTVDKSRWQQGNVFSCSVMHEALHNHYTQKSLSLSPGK

SEQ ID NO: 1435 - protein, 216 aa, Artificial Sequence; identical to SEQ ID NO: 1313
  Description of Artificial Sequence: Synthetic polypeptide
  XENP24118 Light Chain -  avelumab[PD-L1]_L1

SEQ ID NO: 1436 - protein, 444 aa, Artificial Sequence
  Description of Artificial Sequence: Synthetic polypeptide
  XENP31602 Chain 1 - PSMA-H_H1_IgG1_pI(-)_Isosteric_A_/PVA_/S267K /L368D/K370S
EVQLVQSGAEVKKPGASVKVSCKTSGYTFTEYTIHWVRQAPGQSLEWMGNINPNNGGTTYNQKFQGRVTITVDKSTSTAYMELSSLRSEDTAVYYCAAGWNFDYWGQGTLVTVSSASTKGPSVFPLAPSSKSTSGGTAALGCLVKDYFPEPVTVSWNSGALTSGVHTFPAVLQSSGLYSLSSVVTVPSSSLGTQTYICNVNHKPSDTKVDKKVEPKSCDKTHTCPPCPAPPVAGPSVFLFPPKPKDTLMISRTPEVTCVVVDVKHEDPEVKFNWYVDGVEVHNAKTKPREEEYNSTYRVVSVLTVLHQDWLNGKEYKCKVSNKALPAPIEKTISKAKGQPREPQVYTLPPSREEMTKNQVSLTCDVSGFYPSDIAVEWESDGQPENNYKTTPPVLDSDGSFFLYSKLTVDKSRWEQGDVFSCSVMHEALHNHYTQKSLSLSPGK

SEQ ID NO: 1437 - protein, 717 aa, Artificial Sequence
  Description of Artificial Sequence: Synthetic polypeptide
  XENP31602 Chain 2 - PSMA-H_H1_CH1_(G4S)2_[CD3]_H1.30_L1.47_scFv( GKPGS)4_(G4S)2_Fc(222)_IgG1_PVA_/S267K/S364K/E357Q
EVQLVQSGAEVKKPGASVKVSCKTSGYTFTEYTIHWVRQAPGQSLEWMGNINPNNGGTTYNQKFQGRVTITVDKSTSTAYMELSSLRSEDTAVYYCAAGWNFDYWGQGTLVTVSSASTKGPSVFPLAPSSKSTSGGTAALGCLVKDYFPEPVTVSWNSGALTSGVHTFPAVLQSSGLYSLSSVVTVPSSSLGTQTYICNVNHKPSNTKVDKKVEPKSCGGGGSGGGGSEVQLVESGGGLVQPGGSLRLSCAASGFTFSTYAMNWVRQAPGKGLEWVGRIRSKYNNYATYYADSVKGRFTISRDDSKNTLYLQMNSLRAEDTAVYYCVRHGNFGDSYVSWFAYWGQGTLVTVSSGKPGSGKPGSGKPGSGKPGSQAVVTQEPSLTVSPGGTVTLTCGSSTGAVTTSNYANWVQQKPGKSPRGLIGGTNKRAPGVPARFSGSLLGGKAALTISGAQPEDEADYYCALWYSNHWVFGGGTKLTVLGGGGSGGGGSKTHTCPPCPAPPVAGPSVFLFPPKPKDTLMISRTPEVTCVVVDVKHEDPEVKFNWYVDGVEVHNAKTKPREEQYNSTYRVVSVLTVLHQDWLNGKEYKCKVSNKALPAPIEKTISKAKGQPREPQVYTLPPSREQMTKNQVKLTCLVKGFYPSDIAVEWESNGQPENNYKTTPPVLDSDGSFFLYSKLTVDKSRWQQGNVFSCSVMHEALHNHYTQKSLSLSPGK

SEQ ID NO: 1438 - protein, 214 aa, Artificial Sequence
  Description of Artificial Sequence: Synthetic polypeptide
  XENP31602 Chain 3 - PSMA-H_L1 Light Chain
DIVMTQSPDSLAVSLGERATLSCRASQDVGTAVDWYQQKPDQSPKLLIYWASTRHTGVPDRFTGSGSGTDFTLTISSLQAEDVAVYFCQQYNSYPLTFGAGTKVEIKRTVAAPSVFIFPPSDEQLKSGTASVVCLLNNFYPREAKVQWKVDNALQSGNSQESVTEQDSKDSTYSLSSTLTLSKADYEKHKVYACEVTHQGLSSPVTKSFNRGEC

SEQ ID NO: 1439 - protein, 444 aa, Artificial Sequence; identical to SEQ ID NO: 1436
  Description of Artificial Sequence: Synthetic polypeptide
  XENP32220 Chain 1 - PSMA-H_H1_IgG1_pI(-)_Isosteric_A_/PVA_/S267K /L368D/K370S

SEQ ID NO: 1440 - protein, 717 aa, Artificial Sequence
  Description of Artificial Sequence: Synthetic polypeptide
  XENP32220 Chain 2 - PSMA-H_H1_(G4S)_[CD3]_L1.47_H1.32_scFv(GKPGS )4_Fc(222)_IgG1_C220S/PVA_/S267K/S364K/E357Q
EVQLVQSGAEVKKPGASVKVSCKTSGYTFTEYTIHWVRQAPGQSLEWMGNINPNNGGTTYNQKFQGRVTITVDKSTSTAYMELSSLRSEDTAVYYCAAGWNFDYWGQGTLVTVSSASTKGPSVFPLAPSSKSTSGGTAALGCLVKDYFPEPVTVSWNSGALTSGVHTFPAVLQSSGLYSLSSVVTVPSSSLGTQTYICNVNHKPSNTKVDKKVEPKSCGGGGSGGGGSQAVVTQEPSLTVSPGGTVTLTCGSSTGAVTTSNYANWVQQKPGKSPRGLIGGTNKRAPGVPARFSGSLLGGKAALTISGAQPEDEADYYCALWYSNHWVFGGGTKLTVLGKPGSGKPGSGKPGSGKPGSEVQLVESGGGLVQPGGSLRLSCAASGFTFSTYAMNWVRQAPGKGLEWVGRIRSKANNYATYYADSVKGRFTISRDDSKNTLYLQMNSLRAEDTAVYYCVRHGNFGDSYVSWFAYWGQGTLVTVSSGGGGSGGGGSKTHTCPPCPAPPVAGPSVFLFPPKPKDTLMISRTPEVTCVVVDVKHEDPEVKFNWYVDGVEVHNAKTKPREEQYNSTYRVVSVLTVLHQDWLNGKEYKCKVSNKALPAPIEKTISKAKGQPREPQVYTLPPSREQMTKNQVKLTCLVKGFYPSDIAVEWESNGQPENNYKTTPPVLDSDGSFFLYSKLTVDKSRWQQGNVFSCSVMHEALHNHYTQKSLSLSPGK

SEQ ID NO: 1441 - protein, 214 aa, Artificial Sequence
  Description of Artificial Sequence: Synthetic polypeptide
  XENP32220 Chain 3 - PSMA-H_L1.24 Light Chain
DIVMTQSPDSLAVSLGERATLSCRASQDVGTAVDWYQQKPDQSPKLLIYYASTRHTGVPDRFTGSGSGTDFTLTISSLQAEDVAVYFCQQYNSYPLTFGAGTKVEIKRTVAAPSVFIFPPSDEQLKSGTASVVCLLNNFYPREAKVQWKVDNALQSGNSQESVTEQDSKDSTYSLSSTLTLSKADYEKHKVYACEVTHQGLSSPVTKSFNRGEC

SEQ ID NO: 1442 - protein, 254 aa, Artificial Sequence
  Description of Artificial Sequence: Synthetic polypeptide
  CD3 High - [anti-CD3]_H1.30_L1.47_scFv scFv
EVQLVESGGGLVQPGGSLRLSCAASGFTFSTYAMNWVRQAPGKGLEWVGRIRSKYNNYATYYADSVKGRFTISRDDSKNTLYLQMNSLRAEDTAVYYCVRHGNFGDSYVSWFAYWGQGTLVTVSSGKPGSGKPGSGKPGSGKPGSQAVVTQEPSLTVSPGGTVTLTCGSSTGAVTTSNYANWVQQKPGKSPRGLIGGTNKRAPGVPARFSGSLLGGKAALTISGAQPEDEADYYCALWYSNHWVFGGGTKLTVL

SEQ ID NO: 1443 - protein, 125 aa, Artificial Sequence
  Description of Artificial Sequence: Synthetic polypeptide
  CD3 High - [anti-CD3]_H1.30_L1.47_scFv Variable Heavy (vh) Domain
EVQLVESGGGLVQPGGSLRLSCAASGFTFSTYAMNWVRQAPGKGLEWVGRIRSKYNNYATYYADSVKGRFTISRDDSKNTLYLQMNSLRAEDTAVYYCVRHGNFGDSYVSWFAYWGQGTLVTVSS

SEQ ID NO: 1444 - protein, 5 aa, Artificial Sequence
  Description of Artificial Sequence: Synthetic peptide
  CD3 High - [anti-CD3]_H1.30_L1.47_scFv vhCDR1
TYAMN

SEQ ID NO: 1445 - protein, 19 aa, Artificial Sequence
  Description of Artificial Sequence: Synthetic peptide
  CD3 High - [anti-CD3]_H1.30_L1.47_scFv vhCDR2
RIRSKYNNYATYYADSVKG

SEQ ID NO: 1446 - protein, 14 aa, Artificial Sequence
  Description of Artificial Sequence: Synthetic peptide
  CD3 High - [anti-CD3]_H1.30_L1.47_scFv vhCDR3
HGNFGDSYVSWFAY

SEQ ID NO: 1447 - protein, 109 aa, Artificial Sequence
  Description of Artificial Sequence: Synthetic polypeptide
  CD3 High - [anti-CD3]_H1.30_L1.47_scFv Variable Light (vl) Domain
QAVVTQEPSLTVSPGGTVTLTCGSSTGAVTTSNYANWVQQKPGKSPRGLIGGTNKRAPGVPARFSGSLLGGKAALTISGAQPEDEADYYCALWYSNHWVFGGGTKLTVL

SEQ ID NO: 1448 - protein, 14 aa, Artificial Sequence
  Description of Artificial Sequence: Synthetic peptide
  CD3 High - [anti-CD3]_H1.30_L1.47_scFv vlCDR1
GSSTGAVTTSNYAN

SEQ ID NO: 1449 - protein, 7 aa, Artificial Sequence
  Description of Artificial Sequence: Synthetic peptide
  CD3 High - [anti-CD3]_H1.30_L1.47_scFv vlCDR2
GTNKRAP

SEQ ID NO: 1450 - protein, 9 aa, Artificial Sequence
  Description of Artificial Sequence: Synthetic peptide
  CD3 High - [anti-CD3]_H1.30_L1.47_scFv vlCDR3
ALWYSNHWV

SEQ ID NO: 1451 - protein, 20 aa, Artificial Sequence
  Description of Artificial Sequence: Synthetic peptide
  CD3 High - [anti-CD3]_H1.30_L1.47_scFv Linker
GKPGSGKPGSGKPGSGKPGS

SEQ ID NO: 1452 - protein, 254 aa, Artificial Sequence
  Description of Artificial Sequence: Synthetic polypeptide
  CD3 High-Int #1 - [anti-CD3]_H1.32_L1.47_scFv scFv
EVQLVESGGGLVQPGGSLRLSCAASGFTFSTYAMNWVRQAPGKGLEWVGRIRSKANNYATYYADSVKGRFTISRDDSKNTLYLQMNSLRAEDTAVYYCVRHGNFGDSYVSWFAYWGQGTLVTVSSGKPGSGKPGSGKPGSGKPGSQAVVTQEPSLTVSPGGTVTLTCGSSTGAVTTSNYANWVQQKPGKSPRGLIGGTNKRAPGVPARFSGSLLGGKAALTISGAQPEDEADYYCALWYSNHWVFGGGTKLTVL

SEQ ID NO: 1453 - protein, 125 aa, Artificial Sequence
  Description of Artificial Sequence: Synthetic polypeptide
  CD3 High-Int #1 - [anti-CD3]_H1.32_L1.47_scFv Variable Heavy (vh ) Domain
EVQLVESGGGLVQPGGSLRLSCAASGFTFSTYAMNWVRQAPGKGLEWVGRIRSKANNYATYYADSVKGRFTISRDDSKNTLYLQMNSLRAEDTAVYYCVRHGNFGDSYVSWFAYWGQGTLVTVSS

SEQ ID NO: 1454 - protein, 5 aa, Artificial Sequence
  Description of Artificial Sequence: Synthetic peptide
  CD3 High-Int #1 - [anti-CD3]_H1.32_L1.47_scFv vhCDR1
TYAMN

SEQ ID NO: 1455 - protein, 19 aa, Artificial Sequence
  Description of Artificial Sequence: Synthetic peptide
  CD3 High-Int #1 - [anti-CD3]_H1.32_L1.47_scFv vhCDR2
RIRSKANNYATYYADSVKG

SEQ ID NO: 1456 - protein, 14 aa, Artificial Sequence
  Description of Artificial Sequence: Synthetic peptide
  CD3 High-Int #1 - [anti-CD3]_H1.32_L1.47_scFv vhCDR3
HGNFGDSYVSWFAY

SEQ ID NO: 1457 - protein, 109 aa, Artificial Sequence; identical to SEQ ID NO: 1447
  Description of Artificial Sequence: Synthetic polypeptide
  CD3 High-Int #1 - [anti-CD3]_H1.32_L1.47_scFv Variable Light (vl ) Domain

SEQ ID NO: 1458 - protein, 14 aa, Artificial Sequence
  Description of Artificial Sequence: Synthetic peptide
  CD3 High-Int #1 - [anti-CD3]_H1.32_L1.47_scFv vlCDR1
GSSTGAVTTSNYAN

SEQ ID NO: 1459 - protein, 7 aa, Artificial Sequence
  Description of Artificial Sequence: Synthetic peptide
  CD3 High-Int #1 - [anti-CD3]_H1.32_L1.47_scFv vlCDR2
GTNKRAP

SEQ ID NO: 1460 - protein, 9 aa, Artificial Sequence
  Description of Artificial Sequence: Synthetic peptide
  CD3 High-Int #1 - [anti-CD3]_H1.32_L1.47_scFv vlCDR3
ALWYSNHWV

SEQ ID NO: 1461 - protein, 20 aa, Artificial Sequence
  Description of Artificial Sequence: Synthetic peptide
  CD3 High-Int #1 - [anti-CD3]_H1.32_L1.47_scFv Linker
GKPGSGKPGSGKPGSGKPGS

SEQ ID NO: 1462 - protein, 254 aa, Artificial Sequence
  Description of Artificial Sequence: Synthetic polypeptide
  CD3 High-Int #2 - [anti-CD3]_H1.89_L1.47_scFv scFv
EVQLVESGGGLVQPGGSLRLSCAASGFTFSTYAMNWVRQAPGKGLEWVGRIRSKYNNYATYYADSVKGRFTISRDDSKNTLYLQMNSLRAEDTAVYYCVRHGNFGDEYVSWFAYWGQGTLVTVSSGKPGSGKPGSGKPGSGKPGSQAVVTQEPSLTVSPGGTVTLTCGSSTGAVTTSNYANWVQQKPGKSPRGLIGGTNKRAPGVPARFSGSLLGGKAALTISGAQPEDEADYYCALWYSNHWVFGGGTKLTVL

SEQ ID NO: 1463 - protein, 125 aa, Artificial Sequence
  Description of Artificial Sequence: Synthetic polypeptide
  CD3 High-Int #2 - [anti-CD3]_H1.89_L1.47_scFv Variable Heavy (vh ) Domain
EVQLVESGGGLVQPGGSLRLSCAASGFTFSTYAMNWVRQAPGKGLEWVGRIRSKYNNYATYYADSVKGRFTISRDDSKNTLYLQMNSLRAEDTAVYYCVRHGNFGDEYVSWFAYWGQGTLVTVSS

SEQ ID NO: 1464 - protein, 5 aa, Artificial Sequence
  Description of Artificial Sequence: Synthetic peptide
  CD3 High-Int #2 - [anti-CD3]_H1.89_L1.47_scFv vhCDR1
TYAMN

SEQ ID NO: 1465 - protein, 19 aa, Artificial Sequence
  Description of Artificial Sequence: Synthetic peptide
  CD3 High-Int #2 - [anti-CD3]_H1.89_L1.47_scFv vhCDR2
RIRSKYNNYATYYADSVKG

SEQ ID NO: 1466 - protein, 14 aa, Artificial Sequence
  Description of Artificial Sequence: Synthetic peptide
  CD3 High-Int #2 - [anti-CD3]_H1.89_L1.47_scFv vhCDR3
HGNFGDEYVSWFAY

SEQ ID NO: 1467 - protein, 109 aa, Artificial Sequence; identical to SEQ ID NO: 1447
  Description of Artificial Sequence: Synthetic polypeptide
  CD3 High-Int #2 - [anti-CD3]_H1.89_L1.47_scFv Variable Light (vl ) Domain

SEQ ID NO: 1468 - protein, 14 aa, Artificial Sequence
  Description of Artificial Sequence: Synthetic peptide
  CD3 High-Int #2 - [anti-CD3]_H1.89_L1.47_scFv vlCDR1
GSSTGAVTTSNYAN

SEQ ID NO: 1469 - protein, 7 aa, Artificial Sequence
  Description of Artificial Sequence: Synthetic peptide
  CD3 High-Int #2 - [anti-CD3]_H1.89_L1.47_scFv vlCDR2
GTNKRAP

SEQ ID NO: 1470 - protein, 9 aa, Artificial Sequence
  Description of Artificial Sequence: Synthetic peptide
  CD3 High-Int #2 - [anti-CD3]_H1.89_L1.47_scFv vlCDR3
ALWYSNHWV

SEQ ID NO: 1471 - protein, 20 aa, Artificial Sequence
  Description of Artificial Sequence: Synthetic peptide
  CD3 High-Int #2 - [anti-CD3]_H1.89_L1.47_scFv Linker
GKPGSGKPGSGKPGSGKPGS

SEQ ID NO: 1472 - protein, 254 aa, Artificial Sequence
  Description of Artificial Sequence: Synthetic polypeptide
  CD3 High-Int - [anti-CD3]_H1.90_L1.47_scFv scFv
EVQLVESGGGLVQPGGSLRLSCAASGFTFSTYAMNWVRQAPGKGLEWVGRIRSKYNNYATYYADSVKGRFTISRDDSKNTLYLQMNSLRAEDTAVYYCVRHGNFGDPYVSWFAYWGQGTLVTVSSGKPGSGKPGSGKPGSGKPGSQAVVTQEPSLTVSPGGTVTLTCGSSTGAVTTSNYANWVQQKPGKSPRGLIGGTNKRAPGVPARFSGSLLGGKAALTISGAQPEDEADYYCALWYSNHWVFGGGTKLTVL

SEQ ID NO: 1473 - protein, 125 aa, Artificial Sequence
  Description of Artificial Sequence: Synthetic polypeptide
  CD3 High-Int - [anti-CD3]_H1.90_L1.47_scFv Variable Heavy (vh) Domain
EVQLVESGGGLVQPGGSLRLSCAASGFTFSTYAMNWVRQAPGKGLEWVGRIRSKYNNYATYYADSVKGRFTISRDDSKNTLYLQMNSLRAEDTAVYYCVRHGNFGDPYVSWFAYWGQGTLVTVSS

SEQ ID NO: 1474 - protein, 5 aa, Artificial Sequence
  Description of Artificial Sequence: Synthetic peptide
  CD3 High-Int - [anti-CD3]_H1.90_L1.47_scFv vhCDR1
TYAMN

SEQ ID NO: 1475 - protein, 19 aa, Artificial Sequence
  Description of Artificial Sequence: Synthetic peptide
  CD3 High-Int - [anti-CD3]_H1.90_L1.47_scFv vhCDR2
RIRSKYNNYATYYADSVKG

SEQ ID NO: 1476 - protein, 14 aa, Artificial Sequence
  Description of Artificial Sequence: Synthetic peptide
  CD3 High-Int - [anti-CD3]_H1.90_L1.47_scFv vhCDR3
HGNFGDPYVSWFAY

SEQ ID NO: 1477 - protein, 109 aa, Artificial Sequence; identical to SEQ ID NO: 1447
  Description of Artificial Sequence: Synthetic polypeptide
  CD3 High-Int - [anti-CD3]_H1.90_L1.47_scFv Variable Light (vl) Domain

SEQ ID NO: 1478 - protein, 14 aa, Artificial Sequence
  Description of Artificial Sequence: Synthetic peptide
  CD3 High-Int - [anti-CD3]_H1.90_L1.47_scFv vlCDR1
GSSTGAVTTSNYAN

SEQ ID NO: 1479 - protein, 7 aa, Artificial Sequence
  Description of Artificial Sequence: Synthetic peptide
  CD3 High-Int - [anti-CD3]_H1.90_L1.47_scFv vlCDR2
GTNKRAP

SEQ ID NO: 1480 - protein, 9 aa, Artificial Sequence
  Description of Artificial Sequence: Synthetic peptide
  CD3 High-Int - [anti-CD3]_H1.90_L1.47_scFv vlCDR3
ALWYSNHWV

SEQ ID NO: 1481 - protein, 20 aa, Artificial Sequence
  Description of Artificial Sequence: Synthetic peptide
  CD3 High-Int - [anti-CD3]_H1.90_L1.47_scFv Linker
GKPGSGKPGSGKPGSGKPGS

SEQ ID NO: 1482 - protein, 254 aa, Artificial Sequence
  Description of Artificial Sequence: Synthetic polypeptide
  Anti-CD3-Intermediate - [anti-CD3]_H1.33_L1.47_scFv scFv
EVQLVESGGGLVQPGGSLRLSCAASGFTFSTYAMNWVRQAPGKGLEWVGRIRSKYNNYATYYADSVKGRFTISRDDSKNTLYLQMNSLRAEDTAVYYCVRHGNFGDSYVSWFDYWGQGTLVTVSSGKPGSGKPGSGKPGSGKPGSQAVVTQEPSLTVSPGGTVTLTCGSSTGAVTTSNYANWVQQKPGKSPRGLIGGTNKRAPGVPARFSGSLLGGKAALTISGAQPEDEADYYCALWYSNHWVFGGGTKLTVL

SEQ ID NO: 1483 - protein, 125 aa, Artificial Sequence
  Description of Artificial Sequence: Synthetic polypeptide
  Anti-CD3-Intermediate - [anti-CD3]_H1.33_L1.47_scFv Variable Hea vy (vh) Domain
EVQLVESGGGLVQPGGSLRLSCAASGFTFSTYAMNWVRQAPGKGLEWVGRIRSKYNNYATYYADSVKGRFTISRDDSKNTLYLQMNSLRAEDTAVYYCVRHGNFGDSYVSWFDYWGQGTLVTVSS

SEQ ID NO: 1484 - protein, 5 aa, Artificial Sequence
  Description of Artificial Sequence: Synthetic peptide
  Anti-CD3-Intermediate - [anti-CD3]_H1.33_L1.47_scFv vhCDR1
TYAMN

SEQ ID NO: 1485 - protein, 19 aa, Artificial Sequence
  Description of Artificial Sequence: Synthetic peptide
  Anti-CD3-Intermediate - [anti-CD3]_H1.33_L1.47_scFv vhCDR2
RIRSKYNNYATYYADSVKG

SEQ ID NO: 1486 - protein, 14 aa, Artificial Sequence
  Description of Artificial Sequence: Synthetic peptide
  Anti-CD3-Intermediate - [anti-CD3]_H1.33_L1.47_scFv vhCDR3
HGNFGDSYVSWFDY

SEQ ID NO: 1487 - protein, 109 aa, Artificial Sequence; identical to SEQ ID NO: 1447
  Description of Artificial Sequence: Synthetic polypeptide
  Anti-CD3-Intermediate - [anti-CD3]_H1.33_L1.47_scFv Variable Lig ht (vl) Domain

SEQ ID NO: 1488 - protein, 14 aa, Artificial Sequence
  Description of Artificial Sequence: Synthetic peptide
  Anti-CD3-Intermediate - [anti-CD3]_H1.33_L1.47_scFv vlCDR1
GSSTGAVTTSNYAN

SEQ ID NO: 1489 - protein, 7 aa, Artificial Sequence
  Description of Artificial Sequence: Synthetic peptide
  Anti-CD3-Intermediate - [anti-CD3]_H1.33_L1.47_scFv vlCDR2
GTNKRAP

SEQ ID NO: 1490 - protein, 9 aa, Artificial Sequence
  Description of Artificial Sequence: Synthetic peptide
  Anti-CD3-Intermediate - [anti-CD3]_H1.33_L1.47_scFv vlCDR3
ALWYSNHWV

SEQ ID NO: 1491 - protein, 20 aa, Artificial Sequence
  Description of Artificial Sequence: Synthetic peptide
  Anti-CD3-Intermediate - [anti-CD3]_H1.33_L1.47_scFv Linker
GKPGSGKPGSGKPGSGKPGS

SEQ ID NO: 1492 - protein, 254 aa, Artificial Sequence
  Description of Artificial Sequence: Synthetic polypeptide
  CD3 High-Int - [anti-CD3]_H1.31_L1.47_scFv scFv
EVQLVESGGGLVQPGGSLRLSCAASGFTFSTYAMSWVRQAPGKGLEWVGRIRSKYNNYATYYADSVKGRFTISRDDSKNTLYLQMNSLRAEDTAVYYCVRHGNFGDSYVSWFAYWGQGTLVTVSSGKPGSGKPGSGKPGSGKPGSQAVVTQEPSLTVSPGGTVTLTCGSSTGAVTTSNYANWVQQKPGKSPRGLIGGTNKRAPGVPARFSGSLLGGKAALTISGAQPEDEADYYCALWYSNHWVFGGGTKLTVL

SEQ ID NO: 1493 - protein, 125 aa, Artificial Sequence
  Description of Artificial Sequence: Synthetic polypeptide
  CD3 High-Int - [anti-CD3]_H1.31_L1.47_scFv Variable Heavy (vh) Domain
EVQLVESGGGLVQPGGSLRLSCAASGFTFSTYAMSWVRQAPGKGLEWVGRIRSKYNNYATYYADSVKGRFTISRDDSKNTLYLQMNSLRAEDTAVYYCVRHGNFGDSYVSWFAYWGQGTLVTVSS

SEQ ID NO: 1494 - protein, 5 aa, Artificial Sequence
  Description of Artificial Sequence: Synthetic peptide
  CD3 High-Int - [anti-CD3]_H1.31_L1.47_scFv vhCDR1
TYAMS

SEQ ID NO: 1495 - protein, 19 aa, Artificial Sequence
  Description of Artificial Sequence: Synthetic peptide
  CD3 High-Int - [anti-CD3]_H1.31_L1.47_scFv vhCDR2
RIRSKYNNYATYYADSVKG

SEQ ID NO: 1496 - protein, 14 aa, Artificial Sequence
  Description of Artificial Sequence: Synthetic peptide
  CD3 High-Int - [anti-CD3]_H1.31_L1.47_scFv vhCDR3
HGNFGDSYVSWFAY

SEQ ID NO: 1497 - protein, 109 aa, Artificial Sequence; identical to SEQ ID NO: 1447
  Description of Artificial Sequence: Synthetic polypeptide
  CD3 High-Int - [anti-CD3]_H1.31_L1.47_scFv Variable Light (vl) Domain

SEQ ID NO: 1498 - protein, 14 aa, Artificial Sequence
  Description of Artificial Sequence: Synthetic peptide
  CD3 High-Int - [anti-CD3]_H1.31_L1.47_scFv vlCDR1
GSSTGAVTTSNYAN

SEQ ID NO: 1499 - protein, 7 aa, Artificial Sequence
  Description of Artificial Sequence: Synthetic peptide
  CD3 High-Int - [anti-CD3]_H1.31_L1.47_scFv vlCDR2
GTNKRAP

SEQ ID NO: 1500 - protein, 9 aa, Artificial Sequence
  Description of Artificial Sequence: Synthetic peptide
  CD3 High-Int - [anti-CD3]_H1.31_L1.47_scFv vlCDR3
ALWYSNHWV

SEQ ID NO: 1501 - protein, 20 aa, Artificial Sequence
  Description of Artificial Sequence: Synthetic peptide
  CD3 High-Int - [anti-CD3]_H1.31_L1.47_scFv Linker
GKPGSGKPGSGKPGSGKPGS

SEQ ID NO: 1502 - protein, 254 aa, Artificial Sequence
  Description of Artificial Sequence: Synthetic polypeptide
  CD3 High[VL-VH] - [anti-CD3]_L1.47_ H1.30_scFv scFv
QAVVTQEPSLTVSPGGTVTLTCGSSTGAVTTSNYANWVQQKPGKSPRGLIGGTNKRAPGVPARFSGSLLGGKAALTISGAQPEDEADYYCALWYSNHWVFGGGTKLTVLGKPGSGKPGSGKPGSGKPGSEVQLVESGGGLVQPGGSLRLSCAASGFTFSTYAMNWVRQAPGKGLEWVGRIRSKYNNYATYYADSVKGRFTISRDDSKNTLYLQMNSLRAEDTAVYYCVRHGNFGDSYVSWFAYWGQGTLVTVSS

SEQ ID NO: 1503 - protein, 109 aa, Artificial Sequence; identical to SEQ ID NO: 1447
  Description of Artificial Sequence: Synthetic polypeptide
  CD3 High[VL-VH] - [anti-CD3]_L1.47_ H1.30_scFv Variable Light (v l) Domain

SEQ ID NO: 1504 - protein, 14 aa, Artificial Sequence
  Description of Artificial Sequence: Synthetic peptide
  CD3 High[VL-VH] - [anti-CD3]_L1.47_ H1.30_scFv vlCDR1
GSSTGAVTTSNYAN

SEQ ID NO: 1505 - protein, 7 aa, Artificial Sequence
  Description of Artificial Sequence: Synthetic peptide
  CD3 High[VL-VH] - [anti-CD3]_L1.47_ H1.30_scFv vlCDR2
GTNKRAP

SEQ ID NO: 1506 - protein, 9 aa, Artificial Sequence
  Description of Artificial Sequence: Synthetic peptide
  CD3 High[VL-VH] - [anti-CD3]_L1.47_ H1.30_scFv vlCDR3
ALWYSNHWV

SEQ ID NO: 1507 - protein, 125 aa, Artificial Sequence; identical to SEQ ID NO: 1443
  Description of Artificial Sequence: Synthetic polypeptide
  CD3 High[VL-VH] - [anti-CD3]_L1.47_ H1.30_scFv Variable Heavy (v h) Domain

SEQ ID NO: 1508 - protein, 5 aa, Artificial Sequence
  Description of Artificial Sequence: Synthetic peptide
  CD3 High[VL-VH] - [anti-CD3]_L1.47_ H1.30_scFv vhCDR1
TYAMN

SEQ ID NO: 1509 - protein, 19 aa, Artificial Sequence
  Description of Artificial Sequence: Synthetic peptide
  CD3 High[VL-VH] - [anti-CD3]_L1.47_ H1.30_scFv vhCDR2
RIRSKYNNYATYYADSVKG

SEQ ID NO: 1510 - protein, 14 aa, Artificial Sequence
  Description of Artificial Sequence: Synthetic peptide
  CD3 High[VL-VH] - [anti-CD3]_L1.47_ H1.30_scFv vhCDR3
HGNFGDSYVSWFAY

SEQ ID NO: 1511 - protein, 20 aa, Artificial Sequence
  Description of Artificial Sequence: Synthetic peptide
  CD3 High[VL-VH] - [anti-CD3]_L1.47_ H1.30_scFv Linker
GKPGSGKPGSGKPGSGKPGS

SEQ ID NO: 1512 - protein, 254 aa, Artificial Sequence
  Description of Artificial Sequence: Synthetic polypeptide
  CD3 High-Int #1[VL-VH] - [anti-CD3]_L1.47_ H1.32_scFv scFv
QAVVTQEPSLTVSPGGTVTLTCGSSTGAVTTSNYANWVQQKPGKSPRGLIGGTNKRAPGVPARFSGSLLGGKAALTISGAQPEDEADYYCALWYSNHWVFGGGTKLTVLGKPGSGKPGSGKPGSGKPGSEVQLVESGGGLVQPGGSLRLSCAASGFTFSTYAMNWVRQAPGKGLEWVGRIRSKANNYATYYADSVKGRFTISRDDSKNTLYLQMNSLRAEDTAVYYCVRHGNFGDSYVSWFAYWGQGTLVTVSS

SEQ ID NO: 1513 - protein, 109 aa, Artificial Sequence; identical to SEQ ID NO: 1447
  Description of Artificial Sequence: Synthetic polypeptide
  CD3 High-Int #1[VL-VH] - [anti-CD3]_L1.47_ H1.32_scFv Variable Light (vl) Domain

SEQ ID NO: 1514 - protein, 14 aa, Artificial Sequence
  Description of Artificial Sequence: Synthetic peptide
  CD3 High-Int #1[VL-VH] - [anti-CD3]_L1.47_ H1.32_scFv vlCDR1
GSSTGAVTTSNYAN

SEQ ID NO: 1515 - protein, 7 aa, Artificial Sequence
  Description of Artificial Sequence: Synthetic peptide
  CD3 High-Int #1[VL-VH] - [anti-CD3]_L1.47_ H1.32_scFv vlCDR2
GTNKRAP

SEQ ID NO: 1516 - protein, 9 aa, Artificial Sequence
  Description of Artificial Sequence: Synthetic peptide
  CD3 High-Int #1[VL-VH] - [anti-CD3]_L1.47_ H1.32_scFv vlCDR3
ALWYSNHWV

SEQ ID NO: 1517 - protein, 125 aa, Artificial Sequence; identical to SEQ ID NO: 1453
  Description of Artificial Sequence: Synthetic polypeptide
  CD3 High-Int #1[VL-VH] - [anti-CD3]_L1.47_ H1.32_scFv Variable Heavy (vh) Domain

SEQ ID NO: 1518 - protein, 5 aa, Artificial Sequence
  Description of Artificial Sequence: Synthetic peptide
  CD3 High-Int #1[VL-VH] - [anti-CD3]_L1.47_ H1.32_scFv vhCDR1
TYAMN

SEQ ID NO: 1519 - protein, 19 aa, Artificial Sequence
  Description of Artificial Sequence: Synthetic peptide
  CD3 High-Int #1[VL-VH] - [anti-CD3]_L1.47_ H1.32_scFv vhCDR2
RIRSKANNYATYYADSVKG

SEQ ID NO: 1520 - protein, 14 aa, Artificial Sequence
  Description of Artificial Sequence: Synthetic peptide
  CD3 High-Int #1[VL-VH] - [anti-CD3]_L1.47_ H1.32_scFv vhCDR3
HGNFGDSYVSWFAY

SEQ ID NO: 1521 - protein, 20 aa, Artificial Sequence
  Description of Artificial Sequence: Synthetic peptide
  CD3 High-Int #1[VL-VH] - [anti-CD3]_L1.47_ H1.32_scFv Linker
GKPGSGKPGSGKPGSGKPGS

SEQ ID NO: 1522 - protein, 254 aa, Artificial Sequence
  Description of Artificial Sequence: Synthetic polypeptide
  CD3 High-Int #2[VL-VH] - [anti-CD3]_L1.47_ H1.89_scFv scFv
QAVVTQEPSLTVSPGGTVTLTCGSSTGAVTTSNYANWVQQKPGKSPRGLIGGTNKRAPGVPARFSGSLLGGKAALTISGAQPEDEADYYCALWYSNHWVFGGGTKLTVLGKPGSGKPGSGKPGSGKPGSEVQLVESGGGLVQPGGSLRLSCAASGFTFSTYAMNWVRQAPGKGLEWVGRIRSKYNNYATYYADSVKGRFTISRDDSKNTLYLQMNSLRAEDTAVYYCVRHGNFGDEYVSWFAYWGQGTLVTVSS

SEQ ID NO: 1523 - protein, 109 aa, Artificial Sequence; identical to SEQ ID NO: 1447
  Description of Artificial Sequence: Synthetic polypeptide
  CD3 High-Int #2[VL-VH] - [anti-CD3]_L1.47_ H1.89_scFv Variable Light (vl) Domain

SEQ ID NO: 1524 - protein, 14 aa, Artificial Sequence
  Description of Artificial Sequence: Synthetic peptide
  CD3 High-Int #2[VL-VH] - [anti-CD3]_L1.47_ H1.89_scFv vlCDR1
GSSTGAVTTSNYAN

SEQ ID NO: 1525 - protein, 7 aa, Artificial Sequence
  Description of Artificial Sequence: Synthetic peptide
  CD3 High-Int #2[VL-VH] - [anti-CD3]_L1.47_ H1.89_scFv vlCDR2
GTNKRAP

SEQ ID NO: 1526 - protein, 9 aa, Artificial Sequence
  Description of Artificial Sequence: Synthetic peptide
  CD3 High-Int #2[VL-VH] - [anti-CD3]_L1.47_ H1.89_scFv vlCDR3
ALWYSNHWV

SEQ ID NO: 1527 - protein, 125 aa, Artificial Sequence; identical to SEQ ID NO: 1463
  Description of Artificial Sequence: Synthetic polypeptide
  CD3 High-Int #2[VL-VH] - [anti-CD3]_L1.47_ H1.89_scFv Variable Heavy (vh) Domain

SEQ ID NO: 1528 - protein, 5 aa, Artificial Sequence
  Description of Artificial Sequence: Synthetic peptide
  CD3 High-Int #2[VL-VH] - [anti-CD3]_L1.47_ H1.89_scFv vhCDR1
TYAMN

SEQ ID NO: 1529 - protein, 19 aa, Artificial Sequence
  Description of Artificial Sequence: Synthetic peptide
  CD3 High-Int #2[VL-VH] - [anti-CD3]_L1.47_ H1.89_scFv vhCDR2
RIRSKYNNYATYYADSVKG

SEQ ID NO: 1530 - protein, 14 aa, Artificial Sequence
  Description of Artificial Sequence: Synthetic peptide
  CD3 High-Int #2[VL-VH] - [anti-CD3]_L1.47_ H1.89_scFv vhCDR3
HGNFGDEYVSWFAY

SEQ ID NO: 1531 - protein, 20 aa, Artificial Sequence
  Description of Artificial Sequence: Synthetic peptide
  CD3 High-Int #2[VL-VH] - [anti-CD3]_L1.47_ H1.89_scFv Linker
GKPGSGKPGSGKPGSGKPGS

SEQ ID NO: 1532 - protein, 254 aa, Artificial Sequence
  Description of Artificial Sequence: Synthetic polypeptide
  CD3 High-Int[VL-VH] - [anti-CD3]_L1.47_ H1.90_scFv scFv
QAVVTQEPSLTVSPGGTVTLTCGSSTGAVTTSNYANWVQQKPGKSPRGLIGGTNKRAPGVPARFSGSLLGGKAALTISGAQPEDEADYYCALWYSNHWVFGGGTKLTVLGKPGSGKPGSGKPGSGKPGSEVQLVESGGGLVQPGGSLRLSCAASGFTFSTYAMNWVRQAPGKGLEWVGRIRSKYNNYATYYADSVKGRFTISRDDSKNTLYLQMNSLRAEDTAVYYCVRHGNFGDPYVSWFAYWGQGTLVTVSS

SEQ ID NO: 1533 - protein, 109 aa, Artificial Sequence; identical to SEQ ID NO: 1447
  Description of Artificial Sequence: Synthetic polypeptide
  CD3 High-Int[VL-VH] - [anti-CD3]_L1.47_ H1.90_scFv Variable Light (vl) Domain

SEQ ID NO: 1534 - protein, 14 aa, Artificial Sequence
  Description of Artificial Sequence: Synthetic peptide
  CD3 High-Int[VL-VH] - [anti-CD3]_L1.47_ H1.90_scFv vlCDR1
GSSTGAVTTSNYAN

SEQ ID NO: 1535 - protein, 7 aa, Artificial Sequence
  Description of Artificial Sequence: Synthetic peptide
  CD3 High-Int[VL-VH] - [anti-CD3]_L1.47_ H1.90_scFv vlCDR2
GTNKRAP

SEQ ID NO: 1536 - protein, 9 aa, Artificial Sequence
  Description of Artificial Sequence: Synthetic peptide
  CD3 High-Int[VL-VH] - [anti-CD3]_L1.47_ H1.90_scFv vlCDR3
ALWYSNHWV

SEQ ID NO: 1537 - protein, 125 aa, Artificial Sequence; identical to SEQ ID NO: 1473
  Description of Artificial Sequence: Synthetic polypeptide
  CD3 High-Int[VL-VH] - [anti-CD3]_L1.47_ H1.90_scFv Variable Heavy (vh) Domain

SEQ ID NO: 1538 - protein, 5 aa, Artificial Sequence
  Description of Artificial Sequence: Synthetic peptide
  CD3 High-Int[VL-VH] - [anti-CD3]_L1.47_ H1.90_scFv vhCDR1
TYAMN

SEQ ID NO: 1539 - protein, 19 aa, Artificial Sequence
  Description of Artificial Sequence: Synthetic peptide
  CD3 High-Int[VL-VH] - [anti-CD3]_L1.47_ H1.90_scFv vhCDR2
RIRSKYNNYATYYADSVKG

SEQ ID NO: 1540 - protein, 14 aa, Artificial Sequence
  Description of Artificial Sequence: Synthetic peptide
  CD3 High-Int[VL-VH] - [anti-CD3]_L1.47_ H1.90_scFv vhCDR3
HGNFGDPYVSWFAY

SEQ ID NO: 1541 - protein, 20 aa, Artificial Sequence
  Description of Artificial Sequence: Synthetic peptide
  CD3 High-Int[VL-VH] - [anti-CD3]_L1.47_ H1.90_scFv Linker
GKPGSGKPGSGKPGSGKPGS

SEQ ID NO: 1542 - protein, 254 aa, Artificial Sequence
  Description of Artificial Sequence: Synthetic polypeptide
  Anti-CD3-Intermediate[VL-VH] - [anti-CD3]_L1.47_ H1.33_scFv scFv
QAVVTQEPSLTVSPGGTVTLTCGSSTGAVTTSNYANWVQQKPGKSPRGLIGGTNKRAPGVPARFSGSLLGGKAALTISGAQPEDEADYYCALWYSNHWVFGGGTKLTVLGKPGSGKPGSGKPGSGKPGSEVQLVESGGGLVQPGGSLRLSCAASGFTFSTYAMNWVRQAPGKGLEWVGRIRSKYNNYATYYADSVKGRFTISRDDSKNTLYLQMNSLRAEDTAVYYCVRHGNFGDSYVSWFDYWGQGTLVTVSS

SEQ ID NO: 1543 - protein, 109 aa, Artificial Sequence; identical to SEQ ID NO: 1447
  Description of Artificial Sequence: Synthetic polypeptide
  Anti-CD3-Intermediate[VL-VH] - [anti-CD3]_L1.47_ H1.33_scFv Vari able Light (vl) Domain

SEQ ID NO: 1544 - protein, 14 aa, Artificial Sequence
  Description of Artificial Sequence: Synthetic peptide
  Anti-CD3-Intermediate[VL-VH] - [anti-CD3]_L1.47_ H1.33_scFv vlCD R1
GSSTGAVTTSNYAN

SEQ ID NO: 1545 - protein, 7 aa, Artificial Sequence
  Description of Artificial Sequence: Synthetic peptide
  Anti-CD3-Intermediate[VL-VH] - [anti-CD3]_L1.47_ H1.33_scFv vlCD R2
GTNKRAP

SEQ ID NO: 1546 - protein, 9 aa, Artificial Sequence
  Description of Artificial Sequence: Synthetic peptide
  Anti-CD3-Intermediate[VL-VH] - [anti-CD3]_L1.47_ H1.33_scFv vlCD R3
ALWYSNHWV

SEQ ID NO: 1547 - protein, 125 aa, Artificial Sequence; identical to SEQ ID NO: 1483
  Description of Artificial Sequence: Synthetic polypeptide
  Anti-CD3-Intermediate[VL-VH] - [anti-CD3]_L1.47_ H1.33_scFv Vari able Heavy (vh) Domain

SEQ ID NO: 1548 - protein, 5 aa, Artificial Sequence
  Description of Artificial Sequence: Synthetic peptide
  Anti-CD3-Intermediate[VL-VH] - [anti-CD3]_L1.47_ H1.33_scFv vhCD R1
TYAMN

SEQ ID NO: 1549 - protein, 19 aa, Artificial Sequence
  Description of Artificial Sequence: Synthetic peptide
  Anti-CD3-Intermediate[VL-VH] - [anti-CD3]_L1.47_ H1.33_scFv vhCD R2
RIRSKYNNYATYYADSVKG

SEQ ID NO: 1550 - protein, 14 aa, Artificial Sequence
  Description of Artificial Sequence: Synthetic peptide
  Anti-CD3-Intermediate[VL-VH] - [anti-CD3]_L1.47_ H1.33_scFv vhCD R3
HGNFGDSYVSWFDY

SEQ ID NO: 1551 - protein, 20 aa, Artificial Sequence
  Description of Artificial Sequence: Synthetic peptide
  Anti-CD3-Intermediate[VL-VH] - [anti-CD3]_L1.47_ H1.33_scFv Link er
GKPGSGKPGSGKPGSGKPGS

SEQ ID NO: 1552 - protein, 254 aa, Artificial Sequence
  Description of Artificial Sequence: Synthetic polypeptide
  CD3 High-Int[VL-VH] - [anti-CD3]_L1.47_ H1.31_scFv scFv
QAVVTQEPSLTVSPGGTVTLTCGSSTGAVTTSNYANWVQQKPGKSPRGLIGGTNKRAPGVPARFSGSLLGGKAALTISGAQPEDEADYYCALWYSNHWVFGGGTKLTVLGKPGSGKPGSGKPGSGKPGSEVQLVESGGGLVQPGGSLRLSCAASGFTFSTYAMSWVRQAPGKGLEWVGRIRSKYNNYATYYADSVKGRFTISRDDSKNTLYLQMNSLRAEDTAVYYCVRHGNFGDSYVSWFAYWGQGTLVTVSS

SEQ ID NO: 1553 - protein, 109 aa, Artificial Sequence; identical to SEQ ID NO: 1447
  Description of Artificial Sequence: Synthetic polypeptide
  CD3 High-Int[VL-VH] - [anti-CD3]_L1.47_ H1.31_scFv Variable Light (vl) Domain

SEQ ID NO: 1554 - protein, 14 aa, Artificial Sequence
  Description of Artificial Sequence: Synthetic peptide
  CD3 High-Int[VL-VH] - [anti-CD3]_L1.47_ H1.31_scFv vlCDR1
GSSTGAVTTSNYAN

SEQ ID NO: 1555 - protein, 7 aa, Artificial Sequence
  Description of Artificial Sequence: Synthetic peptide
  CD3 High-Int[VL-VH] - [anti-CD3]_L1.47_ H1.31_scFv vlCDR2
GTNKRAP

SEQ ID NO: 1556 - protein, 9 aa, Artificial Sequence
  Description of Artificial Sequence: Synthetic peptide
  CD3 High-Int[VL-VH] - [anti-CD3]_L1.47_ H1.31_scFv vlCDR3
ALWYSNHWV

SEQ ID NO: 1557 - protein, 125 aa, Artificial Sequence; identical to SEQ ID NO: 1493
  Description of Artificial Sequence: Synthetic polypeptide
  CD3 High-Int[VL-VH] - [anti-CD3]_L1.47_ H1.31_scFv Variable Heavy (vh) Domain

SEQ ID NO: 1558 - protein, 5 aa, Artificial Sequence
  Description of Artificial Sequence: Synthetic peptide
  CD3 High-Int[VL-VH] - [anti-CD3]_L1.47_ H1.31_scFv vhCDR1
TYAMS

SEQ ID NO: 1559 - protein, 19 aa, Artificial Sequence
  Description of Artificial Sequence: Synthetic peptide
  CD3 High-Int[VL-VH] - [anti-CD3]_L1.47_ H1.31_scFv vhCDR2
RIRSKYNNYATYYADSVKG

SEQ ID NO: 1560 - protein, 14 aa, Artificial Sequence
  Description of Artificial Sequence: Synthetic peptide
  CD3 High-Int[VL-VH] - [anti-CD3]_L1.47_ H1.31_scFv vhCDR3
HGNFGDSYVSWFAY

SEQ ID NO: 1561 - protein, 20 aa, Artificial Sequence
  Description of Artificial Sequence: Synthetic peptide
  CD3 High-Int[VL-VH] - [anti-CD3]_L1.47_ H1.31_scFv Linker
GKPGSGKPGSGKPGSGKPGS

SEQ ID NO: 1562 - protein, 446 aa, Artificial Sequence
  Description of Artificial Sequence: Synthetic polypeptide
  XENP29154 Heavy Chain - TGN1412_hu5.11A1[CD28]_H1
QVQLVQSGAEVKKPGASVKVSCKASGYTFTSYYIHWVRQAPGQGLEWIGCIYPGNVNTNYNEKFKDRATLTVDTSISTAYMELSRLRSDDTAVYFCTRSHYGLDWNFDVWGQGTTVTVSSASTKGPSVFPLAPCSRSTSESTAALGCLVKDYFPEPVTVSWNSGALTSGVHTFPAVLQSSGLYSLSSVVTVPSSSLGTKTYTCNVDHKPSNTKVDKRVESKYGPPCPSCPAPEFLGGPSVFLFPPKPKDTLMISRTPEVTCVVVDVSQEDPEVQFNWYVDGVEVHNAKTKPREEQFNSTYRVVSVLTVLHQDWLNGKEYKCKVSNKGLPSSIEKTISKAKGQPREPQVYTLPPSQEEMTKNQVSLTCLVKGFYPSDIAVEWESNGQPENNYKTTPPVLDSDGSFFLYSRLTVDKSRWQEGNVFSCSVMHEALHNHYTQKSLSLSLG

SEQ ID NO: 1563 - protein, 214 aa, Artificial Sequence
  Description of Artificial Sequence: Synthetic polypeptide
  XENP29154 Light Chain - TGN1412_hu5.11A1[CD28]_L1
DIQMTQSPSSLSASVGDRVTITCHASQNIYVWLNWYQQKPGKAPKLLIYKASNLHTGVPSRFSGSGSGTDFTLTISSLQPEDFATYYCQQGQTYPYTFGGGTKVEIKRTVAAPSVFIFPPSDEQLKSGTASVVCLLNNFYPREAKVQWKVDNALQSGNSQESVTEQDSKDSTYSLSSTLTLSKADYEKHKVYACEVTHQGLSSPVTKSFNRGEC

SEQ ID NO: 1564 - protein, 30 aa, Artificial Sequence
  Description of Artificial Sequence: Synthetic polypeptide
  1A7 VH HFR1
  MOD_RES (28)..(28): T, S, or N
  MOD_RES (29)..(29): F or L
  MOD_RES (30)..(30): S, E, R, K, G, T, A, or N
EVQLLESGGGLVQPGGSLRLSCAASGFXXX

SEQ ID NO: 1565 - protein, 5 aa, Artificial Sequence
  Description of Artificial Sequence: Synthetic peptide
  1A7 VH HCDR1
  MOD_RES (1)..(1): S, G, E, T, D, A, R, or K
  MOD_RES (2)..(2): Y or N
  MOD_RES (3)..(3): A, Y, or S
  MOD_RES (4)..(4): M or I
  MOD_RES (5)..(5): S, T, or N
XXXXX

SEQ ID NO: 1566 - protein, 14 aa, Artificial Sequence
  Description of Artificial Sequence: Synthetic peptide
  1A7 VH HFR2
  MOD_RES (14)..(14): S or A
WVRQAPGKGLEWVX

SEQ ID NO: 1567 - protein, 17 aa, Artificial Sequence
  Description of Artificial Sequence: Synthetic peptide
  1A7 VH HCDR2
  MOD_RES (1)..(1): T or S
  MOD_RES (3)..(3): S, D, E, Y, or T
  MOD_RES (4)..(4): G, D, E, A, Y, S, N, or T
  MOD_RES (5)..(5): S, D, N, or G
  MOD_RES (6)..(6): D, T, Y, S, or A
  MOD_RES (7)..(7): D, T, Y, S, or A
  MOD_RES (8)..(8): S, Y, A, T, D, or N
XIXXXXXXTYYADSVKG

SEQ ID NO: 1568 - protein, 32 aa, Artificial Sequence
  Description of Artificial Sequence: Synthetic polypeptide
  1A7 VH HFR3
RFTISRDNSKNTLYLQMNSLRAEDTAVYYCAK

SEQ ID NO: 1569 - protein, 12 aa, Artificial Sequence
  Description of Artificial Sequence: Synthetic peptide
  1A7 VH HCDR3
SGPGLRQVGFDY

SEQ ID NO: 1570 - protein, 11 aa, Artificial Sequence
  Description of Artificial Sequence: Synthetic peptide
  1A7 VH HFR4
WGQGTLVTVSS

SEQ ID NO: 1571 - protein, 23 aa, Artificial Sequence
  Description of Artificial Sequence: Synthetic peptide
  1A7 VL LFR1
DIQMTQSPSSLSASVGDRVTITC

SEQ ID NO: 1572 - protein, 11 aa, Artificial Sequence
  Description of Artificial Sequence: Synthetic peptide
  1A7 VL LCDR1
  MOD_RES (8)..(8): S, A, D, G, H, K, N, Q, T, V, or Y
  MOD_RES (9)..(9): Y, A, D, F, H, K, L, N, Q, S, or W
  MOD_RES (11)..(11): N, A, D, G, H, Q, S, T, or Y
RASQSISXXLX

SEQ ID NO: 1573 - protein, 15 aa, Artificial Sequence
  Description of Artificial Sequence: Synthetic peptide
  1A7 VL LFR2
WYQQKPGKAPKLLIY

SEQ ID NO: 1574 - protein, 7 aa, Artificial Sequence
  Description of Artificial Sequence: Synthetic peptide
  1A7 VL LCDR2
  MOD_RES (1)..(1): A, D, G, K, L, Q, S, T, W, or Y
  MOD_RES (4)..(4): S, A, D, K, N, Q, T, or Y
  MOD_RES (6)..(6): Q, A, E, F, H, I, K, N, S, V, or Y
  MOD_RES (7)..(7): Q, A, E, F, H, I, K, N, S, V, or Y
XASXLXX

SEQ ID NO: 1575 - protein, 32 aa, Artificial Sequence
  Description of Artificial Sequence: Synthetic polypeptide
  1A7 VL LFR3
GVPSRFSGSGSGTDFTLTISSLQPEDFATYYC

SEQ ID NO: 1576 - protein, 9 aa, Artificial Sequence
  Description of Artificial Sequence: Synthetic peptide
  1A7 VL LCDR3
  MOD_RES (3)..(3): S, A, D, F, H, K, L, T, V, or Y
  MOD_RES (4)..(4): Y, A, D, F, H, K, L, Q, V, or W
  MOD_RES (5)..(5): S, A, D, G, H, K, N, Q, T, V, or Y
  MOD_RES (6)..(6): T, A, D, F, I, K, L, Q, S, V, or Y
  MOD_RES (8)..(8): F, I, L, or W
QQXXXXPXT

SEQ ID NO: 1577 - protein, 10 aa, Artificial Sequence
  Description of Artificial Sequence: Synthetic peptide
  1A7 VL LFR4
FGQGTKLEIK

SEQ ID NO: 1578 - protein, 30 aa, Artificial Sequence
  Description of Artificial Sequence: Synthetic polypeptide
  2G4 VH HFR1
  MOD_RES (30)..(30): P, S, R, or H
EVQLLESGGGLVQPGGSLRLSCAASGFTFX

SEQ ID NO: 1579 - protein, 5 aa, Artificial Sequence
  Description of Artificial Sequence: Synthetic peptide
  2G4 VH HCDR1
  MOD_RES (1)..(1): S, Q, F, W, or V
  MOD_RES (2)..(2): Y, R, K, S, or A
XXDMS

SEQ ID NO: 1580 - protein, 14 aa, Artificial Sequence
  Description of Artificial Sequence: Synthetic peptide
  2G4 VH HFR2
  MOD_RES (9)..(9): R or G
WVRQAPGKXLEWVS

SEQ ID NO: 1581 - protein, 17 aa, Artificial Sequence
  Description of Artificial Sequence: Synthetic peptide
  2G4 VH HCDR2
  MOD_RES (7)..(7): S or R
TISSGGXFTHYPDSVKG

SEQ ID NO: 1582 - protein, 32 aa, Artificial Sequence
  Description of Artificial Sequence: Synthetic polypeptide
  2G4 VH HFR3
  MOD_RES (31)..(31): V or A
RFTISRDNSKNTLYLQMNSLRAEDTAVYYCXR

SEQ ID NO: 1583 - protein, 9 aa, Artificial Sequence
  Description of Artificial Sequence: Synthetic peptide
  2G4 VH HCDR3
  MOD_RES (3)..(3): G, L, or S
RSXDWYFDV

SEQ ID NO: 1584 - protein, 11 aa, Artificial Sequence
  Description of Artificial Sequence: Synthetic peptide
  2G4 VH HFR4
WGAGTTVTVSS

SEQ ID NO: 1585 - protein, 23 aa, Artificial Sequence
  Description of Artificial Sequence: Synthetic peptide
  2G4 VL LFR1
EIVLTQSPGTLSLSPGERATLSC

SEQ ID NO: 1586 - protein, 12 aa, Artificial Sequence
  Description of Artificial Sequence: Synthetic peptide
  2G4 VL LCDR1
  MOD_RES (2)..(2): V or A
  MOD_RES (4)..(4): S, W, L, or Y
  MOD_RES (5)..(5): S, F, or R
  MOD_RES (6)..(6): I, G, or M
  MOD_RES (7)..(7): S, V, N, I, T, or Q
  MOD_RES (8)..(8): S, F, R, P, L, D, or Q
  MOD_RES (9)..(9): S or T
RXSXXXXXXNLH

SEQ ID NO: 1587 - protein, 15 aa, Artificial Sequence
  Description of Artificial Sequence: Synthetic peptide
  2G4 VL LFR2
  MOD_RES (12)..(12): P or L
WYQQKPGQSPRXLIY

SEQ ID NO: 1588 - protein, 7 aa, Artificial Sequence
  Description of Artificial Sequence: Synthetic peptide
  2G4 VL LCDR2
  MOD_RES (3)..(3): S, N, or I
  MOD_RES (4)..(4): N, L, Q, V, S, or T
  MOD_RES (5)..(5): L or R
  MOD_RES (6)..(6): A, R, or L
  MOD_RES (7)..(7): S, G, or T
GTXXXXX

SEQ ID NO: 1589 - protein, 32 aa, Artificial Sequence
  Description of Artificial Sequence: Synthetic polypeptide
  2G4 VL LFR3
GVPVRFSGSGSGTDYTLTISRLEPEDFAVYYC

SEQ ID NO: 1590 - protein, 10 aa, Artificial Sequence
  Description of Artificial Sequence: Synthetic peptide
  2G4 VL LCDR3
  MOD_RES (4)..(4): S, W, F, or H
  MOD_RES (9)..(9): Y or W
QQWXSYPLXT

SEQ ID NO: 1591 - protein, 10 aa, Artificial Sequence
  Description of Artificial Sequence: Synthetic peptide
  2G4 VL LFR4
FGGGTKVEIK
